(19) United States
(12) Patent Application Publication
(10) Pub. No.: US 2013/0139280 A1
(43) Pub. Date: May 30, 2013

(54) Plants Having Enhanced Yield-Related Traits and a Method for Making the Same

(71) Applicants: Jeong Sheop Shin, Seoul (KR); Kwang Wook Jung, Seoul (KR); Youn-Il Park, Daejeon (KR); Ji-Young Song, Daejeon (KR); Ju Kon Kim, Seoul (KR); Yang Do Choi, Seoul (KR); Christophe Reuzeau, La Chapelle Gonaguet (FR)

(72) Inventors: Jeong Sheop Shin, Seoul (KR); Kwang Wook Jung, Seoul (KR); Youn-Il Park, Daejeon (KR); Ji-Young Song, Daejeon (KR); Ju Kon Kim, Seoul (KR); Yang Do Choi, Seoul (KR); Christophe Reuzeau, La Chapelle Gonaguet (FR)

(21) Appl. No.: 13/806,501

(22) PCT Filed: Jun. 21, 2011
(86) PCT No.: PCT/IB2011/052702

§ 371 Date: Dec. 21, 2012

Related U.S. Application Data
(60) Provisional application No. 61/358,428, filed on Jun. 25, 2010.
(60) Provisional application No. 61/411,967, filed on Nov. 10, 2010.

(51) Int. Cl. C12N 15/82

(52) U.S. Cl. 800/288; 800/290; 435/419; 800/298; 435/320.1; 800/320; 800/320.1; 800/320.2; 800/320.3

(57) ABSTRACT

Methods for enhancing various economically important yield-related traits in plants by modulating expression in a plant of a nucleic acid encoding a LEJ1 (Loss of timing of ET and JA biosynthesisI) polypeptide, ExbB polypeptide, NMPRT (nicotinamide phosphoribosyltransferase) polypeptide, AP2-26-like polypeptide or HD8-like polypeptide are provided. Plants produced by the methods are also provided, which have enhanced yield-related traits relative to corresponding wild type plants or other control plants. Constructs comprising a nucleic acid encoding a LEJ1, ExbB, NMPRT, AP2-26-like or HD8-like polypeptide and uses thereof are provided.

[0001] The present invention relates generally to the field of molecular biology and concerns a method for enhancing yield-related traits in plants by modulating expression in a plant of a nucleic acid encoding an LEJ1 (Loss of timing of ET and JA biosynthesis 1) polypeptide or an AP2-26-like (APETALA2-like transcription factor) polypeptide. The present invention also concerns plants having modulated expression of a nucleic acid encoding an LEJ1 polypeptide or an AP2-26-like polypeptide, which plants have enhanced yield-related traits relative to corresponding wild type plants or other control plants. The invention also provides constructs useful in the methods of the invention.

[0002] The present invention also relates generally to the field of molecular biology and concerns a method for enhancing yield-related traits in plants by modulating expression in a plant of a nucleic acid encoding an ExbB polypeptide or an HD8-like (Homeodomain 8-like) polypeptide. The present invention also concerns plants having modulated expression of a nucleic acid encoding an ExbB polypeptide or an HD8-like polypeptide, which plants have enhanced yield-related traits relative to corresponding wild type plants or other control plants. The invention also provides constructs useful in the methods of the invention.

[0003] The present invention relates generally to the field of molecular biology and concerns a method for enhancing yield-related traits in plants by modulating expression in a plant of a nucleic acid encoding a nicotinamide phosphoribosyltransferase, also referred herein as NMPRT. The present invention also concerns plants having modulated expression of a nucleic acid encoding a NMPRT, which plants have enhanced yield-related traits relative to corresponding wild type plants or other control plants. The invention also provides constructs useful in the methods of the invention.

[0004] The ever-increasing world population and the dwindling supply of arable land available for agriculture fuels research towards increasing the efficiency of agriculture. Conventional means for crop and horticultural improvements utilise selective breeding techniques to identify plants having desirable characteristics. However, such selective breeding techniques have several drawbacks, namely that these techniques are typically labour intensive and result in plants that often contain heterogeneous genetic components that may not always result in the desirable trait being passed on from parent plants. Advances in molecular biology have allowed mankind to modify the germplasm of animals and plants. Genetic engineering of plants entails the isolation and manipulation of genetic material (typically in the form of DNA or RNA) and the subsequent introduction of that genetic material into a plant. Such technology has the capacity to deliver crops or plants having various improved economic, agronomic or horticultural traits.

[0005] A trait of particular economic interest is increased yield. Yield is normally defined as the measurable produce of economic value from a crop. This may be defined in terms of quantity and/or quality. Yield is directly dependent on several factors, for example, the number and size of the organs, plant architecture (for example, the number of branches), seed production, leaf senescence and more. Root development, nutrient uptake, stress tolerance and early vigour may also be important factors in determining yield. Optimizing the abovementioned factors may therefore contribute to increasing crop yield.

[0006] Seed yield is a particularly important trait, since the seeds of many plants are important for human and animal nutrition. Crops such as corn, rice, wheat, canola and soybean account for over half the total human caloric intake, whether through direct consumption of the seeds themselves or through consumption of meat products raised on processed seeds.

[0007] They are also a source of sugars, oils and many kinds of metabolites used in industrial processes. Seeds contain an embryo (the source of new shoots and roots) and an endosperm (the source of nutrients for embryo growth during germination and during early growth of seedlings). The development of a seed involves many genes, and requires the transfer of metabolites from the roots, leaves and stems into the growing seed. The endosperm, in particular, assimilates the metabolic precursors of carbohydrates, oils and proteins and synthesizes them into storage macromolecules to fill out the grain.

[0008] Another important trait for many crops is early vigour. Improving early vigour is an important objective of modern rice breeding programs in both temperate and tropical rice cultivars. Long roots are important for proper soil anchorage in water-seeded rice. Where rice is sown directly into flooded fields, and where plants must emerge rapidly through water, longer shoots are associated with vigour. Where drill-seeding is practiced, longer mesocotyls and coleoptiles are important for good seedling emergence. The ability to engineer early vigour into plants would be of great importance in agriculture. For example, poor early vigour has been a limitation to the introduction of maize (Zea mays L.) hybrids based on Corn Belt germplasm in the European Atlantic.

[0009] A further important trait is that of improved abiotic stress tolerance. Abiotic stress is a primary cause of crop loss worldwide, reducing average yields for most major crop plants by more than 50% (Wang et al., Planta 218, 1-14, 2003). Abiotic stresses may be caused by drought, salinity, extremes of temperature, chemical toxicity and oxidative stress. The ability to improve plant tolerance to abiotic stress would be of great economic advantage to farmers worldwide and would allow for the cultivation of crops during adverse conditions and in territories where cultivation of crops may not otherwise be possible.

[0010] Crop yield may therefore be increased by optimising one of the above-mentioned factors.

[0011] Depending on the end use, the modification of certain yield traits may be favoured over others. For example for applications such as forage or wood production, or bio-fuel resource, an increase in the vegetative parts of a plant may be desirable, and for applications such as flour, starch or oil production, an increase in seed parameters may be particularly desirable. Even amongst the seed parameters, some may be favoured over others, depending on the application. Various mechanisms may contribute to increasing seed yield, whether that is in the form of increased seed size or increased seed number.

[0012] One approach to increasing yield (seed yield and/or biomass) in plants may be through modification of the inherent growth mechanisms of a plant, such as the cell cycle or various signalling pathways involved in plant growth or in defense mechanisms.

[0013] It has now been found that various yield-related traits may be improved in plants by modulating expression in a plant of a nucleic acid encoding an LEJ1 (Loss of timing of ET and JA biosynthesis 1) polypeptide or an AP2-26-like (APETALA2-like transcription factor) polypeptide in a plant.

[0014] It has now also been found that various yield-related traits may be improved in plants by modulating expression in a plant of a nucleic acid encoding an ExbB polypeptide or an HD8-like (Homeodomain 8-like) polypeptide in a plant.

[0015] Background LEJ1 Polypeptide (Loss of Timing of ET and JA Biosynthesis 1 Polypeptide)

[0016] LEJ1 has not been functionally characterised so far. Kleffmann et al. (Curr Biol. 1, 354-362, 2004) reported that LEJ1 protein comprises a cystathionine beta-synthase (CBS) domain; the CBS domain as such has no defined function(s) but is postulated to play a regulatory role for many enzymes and may thus help in maintaining the intracellular redox balance. The protein is predicted to be located in the stroma of the plastid (Zybailov et al. PLoS One. 3(4):e1994, 2008, Rutschow et al. Plant Physiol. 148, 156-75, 2008).

### Background ExbB Polypeptide

[0017] ExbB is known to be part of the TonB-dependent transduction complex. The TonB complex uses the proton gradient across the inner bacterial membrane to transport large molecules across the outer bacterial membrane.

[0018] The TonB-ExbB system and also the Tol-Pal system are able to couple the cytoplasmic membrane proton gradient to energy-requiring processes and thus energize active transport across the outer membrane.

[0019] In E. coli and related Gram-negative bacteria both systems, which are organized in operons, contain three homologous integral plasma membrane proteins: TonB/TolA, ExbB/TolQ, and ExbD/TolR.

[0020] Fang et al. (Molecular & Cellular Proteomics 1.12 (2002): 956-966), identified putative homologues of ExbB/TolQ and of ExbD/TolR in cyanobacterial plasma membranes. No TonB/TolA homologue was found in the genome of Synechocystis. ExbB/TolQ has three predicted transmembrane helices, and ExbD/TolQ has one, which is the same membrane topology as the corresponding E. coli proteins. sll1405 is part of one operon (sll1404/sll1405/sll1406) coding for the ExbB and ExbD proteins and the FhuA protein, which is the outer membrane part of the TonB-ExbB system. Slr0677 is part of another operon slr0677/slr0678, consisting of genes coding for ExbB- and ExbD-like proteins.

[0021] ExbB and TolQ share the same transmembrane topology. Starting with the N-terminus in the periplasm, they traverse the cytoplasmic membrane three times (transmembrane segments in ExbB between residues 16 and 39, 128 and 155, and 162 and 199, total length, 244 residues).

[0022] Suzuki et al. (Molecular Microbiology (2001) 40(1): 235-244) describes that all elements allowing the transport of biopolymers are clustered in an operon in Synechocystis. ExbB, i.e. sll1404, is one of the elements.

[0023] Agarwal et al. (Journal of Proteomics 73 (2010): 976-991) localises ExbB in the thylokoid membranes of chloroplasts in Synechocystis 6803.

[0024] Background Nicotinamide Phosphoribosyltransferase (NMPRT) Polypeptide

[0025] It has now been found that various yield-related traits may be improved in plants by modulating expression in a plant of a nucleic acid encoding a NMPRT (nicotinamide phosphoribosyltransferase) polypeptide in a plant, and in particular by modulating the expression in a plant of a nucleic acid encoding a nicotinamide phosphoribosyltransferase.

[0026] The present invention is directed to nucleic acids encoding a nicotinamide phosphoribosyltransferase and to uses thereof in methods for enhancing yield-related traits in plants relative to control plants.

[0027] In enzymology, a nicotinamide phosphoribosyltransferase, belonging to the EC 2.4.2.12 class, is an enzyme that catalyzes the following chemical reaction: nicotinamide D-ribonucleotide+diphosphate <=>nicotinamide+5-phospho-alpha-D-ribose 1-diphosphate. Thus, the two substrates of this enzyme are i) nicotinamide D-ribonucleotide and ii) diphosphate, whereas its two products are i) nicotinamide and ii) 5-phospho-alpha-D-ribose 1-diphosphate. This enzyme belongs to the family of glycosyltransferases, specifically to the family of pentosyltransferases. The systematic name of this enzyme class is nicotinamide-nucleotide:diphosphate phospho-alpha-D-ribosyltransferase. Other names that are commonly used to denote this enzyme class include NMN pyrophosphorylase; nicotinamide mononucleotide pyrophosphorylase; nicotinamide mononucleotide synthetase; and NMN synthetase. This enzyme participates in nicotinate and nicotinamide metabolism.

[0028] Biosynthesis, salvage and recycling of NAD(P) cofactors is important with respect to their numerous roles. NAD participates in innumerable redox reactions including photosynthesis and respiration, and as a cosubstrate in a number of metabolic and regulatory processes. Studies on microbial NAD metabolism are available in the prior art.

[0029] For instance Gazzaniga et al. (2009; Microbiol Mol Biol Rev 73: 529-541) disclose that NAD is a coenzyme for redox reactions and a substrate of NAD-consuming enzymes, including ADP-ribose transferases, Sir2-related protein lysine deacetylases, and bacterial DNA ligases. Microorganisms that synthesize NAD from as few as one to as many as five of the six identified biosynthetic precursors have been identified. De novo NAD synthesis from aspartate or tryptophan is neither universal nor strictly aerobic. It has been described that salvage NAD synthesis from nicotinamide, nicotinic acid, nicotinamide riboside, and nicotinic acid riboside occurs via modules of different genes. Nicotinamide salvage genes nadV and pncA, found in distinct bacteria, appear to have spread throughout the tree of life via horizontal gene transfer.

[0030] In addition, it can be noted that Gerdes et al. (2006, JOURNAL OF BACTERIOLOGY 3012-3023 Vol. 188, No. 80021) studied the biosynthesis of NAD(P) factors in cyanobacteria using a comparative genomics analysis with verification experiments in the Synochocystis sp. PCC 8803 strain. They disclosed that the product of the slr0788 gene of this strain is a nicotinamide-preferring phosphoribosyltransferase NMPRT involved in the first step of the two-step nondeamidating utilization of nicotinamide (NMN shunt; see FIG. 1 of Gerdes et al). The physiological role of this pathway encoded by a conserved gene cluster, slr0787-slr0788, is likely in the recycling of endogenously generated nicotinamide, as supported by the inability of this cyanobacteria to utilize exogenously provided niacin, which is also known as vitamin B3 or nicotinic acid.

[0031] Background AP2-26-Like Polypeptide

[0032] Transcription factors regulate the transcription of genes. Three general categories of transcription factors can be discriminated: those that bind to RNA polymerase, those that bind to another transcription factor, and those that bind to specific DNA sequences. The last group mostly bind upstream of the target gene in the promoter sequence. AP2 (APETALA2) and EREBPs (ethylene-responsive element binding proteins, or ERF, ethylene response factors) are the prototypic members of a family of transcription factors unique to plants, whose distinguishing characteristic is that they contain the so-called AP2 DNA-binding domain. AP2/EREBP genes form a large multigene family (the AP2/ERF superfamily), and they play a variety of roles throughout the plant life cycle: from being key regulators of several developmental processes, like floral organ identity determination or control of leaf epidermal cell identity, to forming part of the mechanisms used by plants to respond to various types of biotic and environmental stress. Within the AP2/ERF superfamily, 3 large families are discriminated: the AP2 family with two AP2/ERF domains, the ERF family with a single AP2/ERF domain and the RAV family comprising a B3-type DNA binding domain. Nakano et al. (Plant Physiology 140, 411-432, 2006) studied the ERF gene family in Arabidopsis and rice, and divided the Arabidopsis ERF gene family into 12 groups (designated Group I to X, and a Group VI-like and Group Xb-like), whereas in the case of rice 15 groups were discriminated. The Arabidopsis Group VII proteins are characterised by a conserved N-terminal motif, referred to as Conserved Motif VII-1 (CMVII-1). In rice, Group VII comprises more proteins than the Arabidopsis Group VII, and though many conserved motifs are in common between the rice and Arabidopsis Group VII, a separate rice Group VIIb was created for a sequence lacking this typical CMVII-1 motif. Functionally, members of Group VII are described to be involved in osmotic stress and disease responses (for example in WO 2003007699). Ectopic overexpression of tomato JERF3 in tobacco increased the salt tolerance of the transgenics (Wang et al., Plant Molecular Biology 58, 183-192, 2004), and pepper transcription factor CaPF1 overexpression resulted in increased osmotic tolerance in pine (Tang et al, Plant Cell Rep. 26, 115-124, 2007), but also increased pathogen resistance in Arabidopsis (Yi et al., Plant Physiol. 136, 2862-2874, 2004). A similar observation was made for barley HvRAF (Jung et al., Planta Epub 26 Aug. 2006). Furthermore, a Group VII type ERF protein was used in a process for the production of Methionine (EP2005003297).

[0033] Background HD8-Like Polypeptide

[0034] HD-ZIP transcription factors (TF) are part of a large superfamily that comprises furthermore PHD-finger TF, BELL, ZF-HD TF, WOX and KNOX transcription factors. HD-ZIP TF are involved in a number of physiological and developmental processes such as responses to environmental conditions, organ and vascular development, meristem regulation and mediaton of hormone signaling. The family of HD-ZIP proteins can be subdivided into 4 subfamilies (I to IV). The DNA sequences targeted by HD-ZIP subfamily IV TF are characterised by a TAAA core sequence.

[0035] Summary LEJ1 Polypeptide (Loss of Timing of ET and JA Biosynthesis 1 Polypeptide)

[0036] Surprisingly, it has now been found that modulating expression of a nucleic acid encoding an LEJ1 polypeptide as defined herein gives plants having enhanced yield-related traits, in particular increased yield relative to control plants.

[0037] According to one embodiment, there is provided a method for improving yield-related traits as provided herein in plants relative to control plants, comprising modulating expression in a plant of a nucleic acid encoding an LEJ1 polypeptide as defined herein.

[0038] Summary ExbB Polypeptide

[0039] Surprisingly, it has now been found that modulating expression of a nucleic acid encoding an ExbB polypeptide gives plants having enhanced yield-related traits, in particular increased yield and more in particular increased seed yield relative to control plants.

[0040] According to one embodiment, there is provided a method for improving yield-related traits in plants relative to control plants, comprising modulating expression in a plant of a nucleic acid encoding an ExbB polypeptide.

[0041] Summary Nicotinamide Phosphoribosyltransferase (NMPRT) Polypeptide

[0042] Surprisingly, it has now been found that modulating expression of a nucleic acid encoding a NMPRT or homologues thereof as defined herein gives plants having enhanced yield-related traits, in particular increased yield, and more particularly increased seed yield, relative to control plants.

[0043] According to one embodiment, there is provided a method for improving yield-related traits as provided herein in plants relative to control plants, comprising modulating expression in a plant of a nucleic acid encoding a NMPRT polypeptide as defined herein. In other embodiments, the invention also provides nucleic acids and polypeptides and uses thereof in particular for improving yield-related traits as provided herein in plants relative to control plants; constructs; cells; and transgenic organisms such as transgenic plants.

[0044] Summary AP2-26-Like Polypeptide

[0045] Surprisingly, it has now been found that modulating expression of a nucleic acid encoding an AP2-26-like polypeptide as defined herein gives plants having enhanced yield-related traits, in particular early vigour and/or increased seed yield relative to control plants.

[0046] It has also been found that modulating expression of a nucleic acid encoding an HD8-like polypeptide as defined herein gives plants having enhanced yield-related traits, in particular increased seed yield relative to control plants.

[0047] According one embodiment, there is provided a method for improving yield-related traits as provided herein in plants relative to control plants, comprising modulating expression in a plant of a nucleic acid encoding an AP2-26-like polypeptide as defined herein.

[0048] Summary HD8-Like Polypeptide

[0049] According to another embodiment, there is provided a method for improving yield-related traits as provided herein in plants relative to control plants, comprising modulating expression in a plant of a nucleic acid encoding an HD8-like polypeptide as defined herein.

[0050] The section captions and headings in this specification are for convenience and reference purpose only and should not affect in any way the meaning or interpretation of this specification.

### DEFINITIONS

[0051] The following definitions will be used throughout the present specification.

[0052] Polypeptide(s)/Protein(s)

[0053] The terms “polypeptide” and “protein” are used interchangeably herein and refer to amino acids in a polymeric form of any length, linked together by peptide bonds.

[0054] Polynucleotide(s)/Nucleic Acid(s)/Nucleic Acid Sequence(s)/Nucleotide Sequence(s)

[0055] The terms “polynucleotide(s)”, “nucleic acid sequence(s)”, “nucleotide sequence(s)”, “nucleic acid(s)”, “nucleic acid molecule” are used interchangeably herein and refer to nucleotides, either ribonucleotides or deoxyribonucleotides or a combination of both, in a polymeric unbranched form of any length.

[0056] Homologue(s)

[0057] “Homologues” of a protein encompass peptides, oligopeptides, polypeptides, proteins and enzymes having amino acid substitutions, deletions and/or insertions relative to the unmodified protein in question and having similar biological and functional activity as the unmodified protein from which they are derived.

[0058] A deletion refers to removal of one or more amino acids from a protein.

[0059] An insertion refers to one or more amino acid residues being introduced into a predetermined site in a protein. Insertions may comprise N-terminal and/or C-terminal fusions as well as intra-sequence insertions of single or multiple amino acids. Generally, insertions within the amino acid sequence will be smaller than N- or C-terminal fusions, of the order of about 1 to 10 residues. Examples of N- or C-terminal fusion proteins or peptides include the binding domain or activation domain of a transcriptional activator as used in the yeast two-hybrid system, phage coat proteins, (histidine)-6-tag, glutathione S-transferase-tag, protein A, maltose-binding protein, dihydrofolate reductase, Tag•100 epitope, c-myc epitope, FLAG®-epitope, lacZ, CMP (calmodulin-binding peptide), HA epitope, protein C epitope and VSV epitope.

[0060] A substitution refers to replacement of amino acids of the protein with other amino acids having similar properties (such as similar hydrophobicity, hydrophilicity, antigenicity, propensity to form or break α-helical structures or β-sheet structures). Amino acid substitutions are typically of single residues, but may be clustered depending upon functional constraints placed upon the polypeptide and may range from 1 to 10 amino acids; insertions will usually be of the order of about 1 to 10 amino acid residues. The amino acid substitutions are preferably conservative amino acid substitutions. Conservative substitution tables are well known in the art (see for example Creighton (1984) Proteins. W.H. Freeman and Company (Eds) and Table 1 below).

TABLE 1
Examples of conserved amino acid substitutions

| Residue | Conservative Substitutions |
|---|---|
| Ala | Ser |
| Arg | Lys |
| Asn | Gln; His |
| Asp | Glu |
| Gln | Asn |
| Cys | Ser |
| Glu | Asp |
| Gly | Pro |
| His | Asn; Gln |
| Ile | Leu, Val |
| Leu | Ile; Val |
| Lys | Arg; Gln |
| Met | Leu; Ile |
| Phe | Met; Leu; Tyr |
| Ser | Thr; Gly |
| Thr | Ser; Val |
| Trp | Tyr |
| Tyr | Trp; Phe |
| Val | Ile; Leu |

[0061] Amino acid substitutions, deletions and/or insertions may readily be made using peptide synthetic techniques well known in the art, such as solid phase peptide synthesis and the like, or by recombinant DNA manipulation. Methods for the manipulation of DNA sequences to produce substitution, insertion or deletion variants of a protein are well known in the art. For example, techniques for making substitution mutations at predetermined sites in DNA are well known to those skilled in the art and include M13 mutagenesis, T7-Gen in vitro mutagenesis (USB, Cleveland, Ohio), QuickChange Site Directed mutagenesis (Stratagene, San Diego, Calif.), PCR-mediated site-directed mutagenesis or other site-directed mutagenesis protocols.

[0062] Derivatives

[0063] “Derivatives” include peptides, oligopeptides, polypeptides which may, compared to the amino acid sequence of the naturally-occurring form of the protein, such as the protein of interest, comprise substitutions of amino acids with non-naturally occurring amino acid residues, or additions of non-naturally occurring amino acid residues. “Derivatives” of a protein also encompass peptides, oligopeptides, polypeptides which comprise naturally occurring altered (glycosylated, acylated, prenylated, phosphorylated, myristoylated, sulphated etc.) or non-naturally altered amino acid residues compared to the amino acid sequence of a naturally-occurring form of the polypeptide. A derivative may also comprise one or more non-amino acid substituents or additions compared to the amino acid sequence from which it is derived, for example a reporter molecule or other ligand, covalently or non-covalently bound to the amino acid sequence, such as a reporter molecule which is bound to facilitate its detection, and non-naturally occurring amino acid residues relative to the amino acid sequence of a naturally-occurring protein. Furthermore, “derivatives” also include fusions of the naturally-occurring form of the protein with tagging peptides such as FLAG, HIS6 or thioredoxin (for a review of tagging peptides, see Terpe, Appl. Microbiol. Biotechnol. 60, 523-533, 2003).

[0064] Orthologue(s)/Paralogue(s)

[0065] Orthologues and paralogues encompass evolutionary concepts used to describe the ancestral relationships of genes. Paralogues are genes within the same species that have originated through duplication of an ancestral gene; orthologues are genes from different organisms that have originated through speciation, and are also derived from a common ancestral gene.

[0066] Domain, Motif/Consensus Sequence/Signature

[0067] The term “domain” refers to a set of amino acids conserved at specific positions along an alignment of sequences of evolutionarily related proteins. While amino acids at other positions can vary between homologues, amino acids that are highly conserved at specific positions indicate amino acids that are likely essential in the structure, stability or function of a protein. Identified by their high degree of conservation in aligned sequences of a family of protein homologues, they can be used as identifiers to determine if any polypeptide in question belongs to a previously identified polypeptide family.

[0068] The term “motif” or “consensus sequence” or “signature” refers to a short conserved region in the sequence of evolutionarily related proteins. Motifs are frequently highly conserved parts of domains, but may also include only part of the domain, or be located outside of conserved domain (if all of the amino acids of the motif fall outside of a defined domain).

[0069] Specialist databases exist for the identification of domains, for example, SMART (Schultz et al. (1998) Proc. Natl. Acad. Sci. USA 95, 5857-5864; Letunic et al. (2002) Nucleic Acids Res 30, 242-244), InterPro (Mulder et al., (2003) Nucl. Acids. Res. 31, 315-318), Prosite (Bucher and Bairoch (1994), A generalized profile syntax for biomolecular sequences motifs and its function in automatic sequence interpretation. (In) ISMB-94; Proceedings 2nd International Conference on Intelligent Systems for Molecular Biology. Altman R., Brutlag D., Karp P., Lathrop R., Searls D., Eds., pp 53-61, AAAI Press, Menlo Park; Hulo et al., Nucl. Acids. Res. 32:D134-D137, (2004)), or Pfam (Bateman et al., Nucleic Acids Research 30(1): 276-280 (2002)). A set of tools for in silico analysis of protein sequences is available on the ExPASy proteomics server (Swiss Institute of Bioinformatics (Gasteiger et al., ExPASy: the proteomics server for in-depth protein knowledge and analysis, Nucleic Acids Res. 31:3784-3788 (2003)). Domains or motifs may also be identified using routine techniques, such as by sequence alignment.

[0070] Methods for the alignment of sequences for comparison are well known in the art, such methods include GAP, BESTFIT, BLAST, FASTA and TFASTA. GAP uses the algorithm of Needleman and Wunsch ((1970) J Mol Biol 48: 443-453) to find the global (i.e. spanning the complete sequences) alignment of two sequences that maximizes the number of matches and minimizes the number of gaps. The BLAST algorithm (Altschul et al. (1990) J Mol Biol 215: 403-10) calculates percent sequence identity and performs a statistical analysis of the similarity between the two sequences. The software for performing BLAST analysis is publicly available through the National Centre for Biotechnology Information (NCBI). Homologues may readily be identified using, for example, the ClustalW multiple sequence alignment algorithm (version 1.83), with the default pairwise alignment parameters, and a scoring method in percentage. Global percentages of similarity and identity may also be determined using one of the methods available in the MatGAT software package (Campanella et al., BMC Bioinformatics. 2003 Jul. 10; 4:29. MatGAT: an application that generates similarity/identity matrices using protein or DNA sequences.). Minor manual editing may be performed to optimise alignment between conserved motifs, as would be apparent to a person skilled in the art. Furthermore, instead of using full-length sequences for the identification of homologues, specific domains may also be used. The sequence identity values may be determined over the entire nucleic acid or amino acid sequence or over selected domains or conserved motif(s), using the programs mentioned above using the default parameters. For local alignments, the Smith-Waterman algorithm is particularly useful (Smith T F, Waterman M S (1981) J. Mol. Biol. 147(1); 195-7).

[0071] Reciprocal BLAST

[0072] Typically, this involves a first BLAST involving BLASTing a query sequence (for example using any of the sequences listed in Table A, F and J of the Examples section) against any sequence database, such as the publicly available NCBI database. BLASTN or TBLASTX (using standard default values) are generally used when starting from a nucleotide sequence, and BLASTP or TBLASTN (using standard default values) when starting from a protein sequence. The BLAST results may optionally be filtered. The full-length sequences of either the filtered results or non-filtered results are then BLASTed back (second BLAST) against sequences from the organism from which the query sequence is derived. The results of the first and second BLASTs are then compared. A paralogue is identified if a high-ranking hit from the first blast is from the same species as from which the query sequence is derived, a BLAST back then ideally results in the query sequence amongst the highest hits; an orthologue is identified if a high-ranking hit in the first BLAST is not from the same species as from which the query sequence is derived, and preferably results upon BLAST back in the query sequence being among the highest hits.

[0073] High-ranking hits are those having a low E-value. The lower the E-value, the more significant the score (or in other words the lower the chance that the hit was found by chance). Computation of the E-value is well known in the art. In addition to E-values, comparisons are also scored by percentage identity. Percentage identity refers to the number of identical nucleotides (or amino acids) between the two compared nucleic acid (or polypeptide) sequences over a particular length. In the case of large families, ClustalW may be used, followed by a neighbour joining tree, to help visualize clustering of related genes and to identify orthologues and paralogues.

[0074] Hybridisation

[0075] The term “hybridisation” as defined herein is a process wherein substantially homologous complementary nucleotide sequences anneal to each other. The hybridisation process can occur entirely in solution, i.e. both complementary nucleic acids are in solution. The hybridisation process can also occur with one of the complementary nucleic acids immobilised to a matrix such as magnetic beads, Sepharose beads or any other resin. The hybridisation process can furthermore occur with one of the complementary nucleic acids immobilised to a solid support such as a nitro-cellulose or nylon membrane or immobilised by e.g. photolithography to, for example, a siliceous glass support (the latter known as nucleic acid arrays or microarrays or as nucleic acid chips). In order to allow hybridisation to occur, the nucleic acid molecules are generally thermally or chemically denatured to melt a double strand into two single strands and/or to remove hairpins or other secondary structures from single stranded nucleic acids.

[0076] The term “stringency” refers to the conditions under which a hybridisation takes place. The stringency of hybridisation is influenced by conditions such as temperature, salt concentration, ionic strength and hybridisation buffer composition. Generally, low stringency conditions are selected to be about 30° C. lower than the thermal melting point (Tₘ) for the specific sequence at a defined ionic strength and pH. Medium stringency conditions are when the temperature is 20° C. below Tₘ, and high stringency conditions are when the temperature is 10° C. below Tₘ. High stringency hybridisation conditions are typically used for isolating hybridising sequences that have high sequence similarity to the target nucleic acid sequence. However, nucleic acids may deviate in sequence and still encode a substantially identical polypeptide, due to the degeneracy of the genetic code. Therefore medium stringency hybridisation conditions may sometimes be needed to identify such nucleic acid molecules.

[0077] The Tₘ is the temperature under defined ionic strength and pH, at which 50% of the target sequence hybridises to a perfectly matched probe. The Tₘ is dependent upon the solution conditions and the base composition and length of the probe. For example, longer sequences hybridise specifically at higher temperatures. The maximum rate of hybridisation is obtained from about 16° C. up to 32° C. below Tₘ. The presence of monovalent cations in the hybridisation solution reduce the electrostatic repulsion between the two nucleic acid strands thereby promoting hybrid formation; this effect is visible for sodium concentrations of up to 0.4M (for higher concentrations, this effect may be ignored). Formamide reduces the melting temperature of DNA-DNA and DNA-RNA duplexes with 0.6 to 0.7° C. for each percent formamide, and addition of 50% formamide allows hybridisation to be performed at 30 to 45° C., though the rate of hybridisation will be lowered. Base pair mismatches reduce the hybridisation rate and the thermal stability of the duplexes. On average and for large probes, the Tm decreases about 1° C. per % base mismatch. The Tₘ may be calculated using the following equations, depending on the types of hybrids:

1) DNA-DNA hybrids (Meinkoth and Wahl, Anal. Biochem., 138: 267-284, 1984):

Tₘ=81.5° C.+16.6×log₁₀ [Na⁺]^{a}+0.41×%[G/C^{b}]−500×[L^{c}]⁻¹−0.61×% formamide

^{a} or for other monovalent cation, but only accurate in the 0.01-0.4 M range.^{b} only accurate for % GC in the 30% to 75% range.^{c} L=length of duplex in base pairs.
2) DNA-RNA or RNA-RNA hybrids:

Tₘ=79.8° C.+18.5(log₁₀ [Na⁺]^{a})+0.58(% G/C^{b})+11.8(% G/C^{b})²−820/L^{c}

3) oligo-DNA or oligo-RNA_{d} hybrids: ^{d} oligo, oligonucleotide; lₙ,=effective length of primer=2×(no. of G/C)+(no. of A/T).
[0078] For <20 nucleotides: Tₘ=2 (Iₙ)
[0079] For 20-35 nucleotides: Tₘ=22+1.46 (Iₙ)

[0080] Non-specific binding may be controlled using any one of a number of known techniques such as, for example, blocking the membrane with protein containing solutions, additions of heterologous RNA, DNA, and SDS to the hybridisation buffer, and treatment with Rnase. For non-homologous probes, a series of hybridizations may be performed by varying one of (i) progressively lowering the annealing temperature (for example from 68° C. to 42° C.) or (ii) progressively lowering the formamide concentration (for example from 50% to 0%). The skilled artisan is aware of various parameters which may be altered during hybridisation and which will either maintain or change the stringency conditions.

[0081] Besides the hybridisation conditions, specificity of hybridisation typically also depends on the function of post-hybridisation washes. To remove background resulting from non-specific hybridisation, samples are washed with dilute salt solutions. Critical factors of such washes include the ionic strength and temperature of the final wash solution: the lower the salt concentration and the higher the wash temperature, the higher the stringency of the wash. Wash conditions are typically performed at or below hybridisation stringency. A positive hybridisation gives a signal that is at least twice of that of the background. Generally, suitable stringent conditions for nucleic acid hybridisation assays or gene amplification detection procedures are as set forth above. More or less stringent conditions may also be selected. The skilled artisan is aware of various parameters which may be altered during washing and which will either maintain or change the stringency conditions.

[0082] For example, typical high stringency hybridisation conditions for DNA hybrids longer than 50 nucleotides encompass hybridisation at 65° C. in 1×SSC or at 42° C. in 1×SSC and 50% formamide, followed by washing at 65° C. in 0.3×SSC. Examples of medium stringency hybridisation conditions for DNA hybrids longer than 50 nucleotides encompass hybridisation at 50° C. in 4×SSC or at 40° C. in 6×SSC and 50% formamide, followed by washing at 50° C. in 2×SSC. The length of the hybrid is the anticipated length for the hybridising nucleic acid. When nucleic acids of known sequence are hybridised, the hybrid length may be determined by aligning the sequences and identifying the conserved regions described herein. 1×SSC is 0.15M NaCl and 15 mM sodium citrate; the hybridisation solution and wash solutions may additionally include 5×Denhardt's reagent, 0.5-1.0% SDS, 100 μg/ml denatured, fragmented salmon sperm DNA, 0.5% sodium pyrophosphate.

[0083] For the purposes of defining the level of stringency, reference can be made to Sambrook et al. (2001) Molecular Cloning: a laboratory manual, 3rd Edition, Cold Spring Harbor Laboratory Press, CSH, New York or to Current Protocols in Molecular Biology, John Wiley & Sons, N.Y. (1989 and yearly updates).

[0084] Splice Variant

[0085] The term “splice variant” as used herein encompasses variants of a nucleic acid sequence in which selected introns and/or exons have been excised, replaced, displaced or added, or in which introns have been shortened or lengthened. Such variants will be ones in which the biological activity of the protein is substantially retained; this may be achieved by selectively retaining functional segments of the protein. Such splice variants may be found in nature or may be manmade. Methods for predicting and isolating such splice variants are well known in the art (see for example Foissac and Schiex (2005) BMC Bioinformatics 6: 25).

[0086] Allelic Variant

[0087] Alleles or allelic variants are alternative forms of a given gene, located at the same chromosomal position. Allelic variants encompass Single Nucleotide Polymorphisms (SNPs), as well as Small Insertion/Deletion Polymorphisms (INDELs). The size of INDELs is usually less than 100 bp. SNPs and INDELs form the largest set of sequence variants in naturally occurring polymorphic strains of most organisms.

[0088] Endogenous Gene

[0089] Reference herein to an “endogenous” gene not only refers to the gene in question as found in a plant in its natural form (i.e., without there being any human intervention), but also refers to that same gene (or a substantially homologous nucleic acid/gene) in an isolated form subsequently (re)introduced into a plant (a transgene). For example, a transgenic plant containing such a transgene may encounter a substantial reduction of the transgene expression and/or substantial reduction of expression of the endogenous gene. The isolated gene may be isolated from an organism or may be manmade, for example by chemical synthesis.

[0090] In the context of the present invention, the term “isolated nucleic acid” or “isolated polypeptide” may in some instances be considered as a synonym for a “recombinant nucleic acid” or a “recombinant polypeptide”, respectively and refers to a nucleic acid or polypeptide respectively that is not located in its natural genetic environment and/or that has been modified by recombinant methods.

[0091] Gene Shuffling/Directed Evolution

[0092] Gene shuffling or directed evolution consists of iterations of DNA shuffling followed by appropriate screening and/or selection to generate variants of nucleic acids or portions thereof encoding proteins having a modified biological activity (Castle et al., (2004) Science 304(5674): 1151-4; U.S. Pat. Nos. 5,811,238 and 6,395,547).

[0093] Construct

[0094] Additional regulatory elements may include transcriptional as well as translational enhancers. Those skilled in the art will be aware of terminator and enhancer sequences that may be suitable for use in performing the invention. An intron sequence may also be added to the 5′ untranslated region (UTR) or in the coding sequence to increase the amount of the mature message that accumulates in the cytosol, as described in the definitions section. Other control sequences (besides promoter, enhancer, silencer, intron sequences, 3′UTR and/or 5′UTR regions) may be protein and/or RNA stabilizing elements. Such sequences would be known or may readily be obtained by a person skilled in the art.

[0095] The genetic constructs of the invention may further include an origin of replication sequence that is required for maintenance and/or replication in a specific cell type. One example is when a genetic construct is required to be maintained in a bacterial cell as an episomal genetic element (e.g. plasmid or cosmid molecule). Preferred origins of replication include, but are not limited to, the f1-ori and colE1.

[0096] For the detection of the successful transfer of the nucleic acid sequences as used in the methods of the invention and/or selection of transgenic plants comprising these nucleic acids, it is advantageous to use marker genes (or reporter genes). Therefore, the genetic construct may optionally comprise a selectable marker gene. Selectable markers are described in more detail in the “definitions” section herein. The marker genes may be removed or excised from the transgenic cell once they are no longer needed. Techniques for marker removal are known in the art, useful techniques are described above in the definitions section.

[0097] Regulatory Element/Control Sequence/Promoter

[0098] The terms “regulatory element”, “control sequence” and “promoter” are all used interchangeably herein and are to be taken in a broad context to refer to regulatory nucleic acid sequences capable of effecting expression of the sequences to which they are ligated. The term “promoter” typically refers to a nucleic acid control sequence located upstream from the transcriptional start of a gene and which is involved in recognising and binding of RNA polymerase and other proteins, thereby directing transcription of an operably linked nucleic acid. Encompassed by the aforementioned terms are transcriptional regulatory sequences derived from a classical eukaryotic genomic gene (including the TATA box which is required for accurate transcription initiation, with or without a CCAAT box sequence) and additional regulatory elements (i.e. upstream activating sequences, enhancers and silencers) which alter gene expression in response to developmental and/or external stimuli, or in a tissue-specific manner. Also included within the term is a transcriptional regulatory sequence of a classical prokaryotic gene, in which case it may include a −35 box sequence and/or −10 box transcriptional regulatory sequences. The term “regulatory element” also encompasses a synthetic fusion molecule or derivative that confers, activates or enhances expression of a nucleic acid molecule in a cell, tissue or organ.

[0099] A “plant promoter” comprises regulatory elements, which mediate the expression of a coding sequence segment in plant cells. Accordingly, a plant promoter need not be of plant origin, but may originate from viruses or micro-organisms, for example from viruses which attack plant cells. The “plant promoter” can also originate from a plant cell, e.g. from the plant which is transformed with the nucleic acid sequence to be expressed in the inventive process and described herein. This also applies to other “plant” regulatory signals, such as “plant” terminators. The promoters upstream of the nucleotide sequences useful in the methods of the present invention can be modified by one or more nucleotide substitution(s), insertion(s) and/or deletion(s) without interfering with the functionality or activity of either the promoters, the open reading frame (ORF) or the 3′-regulatory region such as terminators or other 3′ regulatory regions which are located away from the ORF. It is furthermore possible that the activity of the promoters is increased by modification of their sequence, or that they are replaced completely by more active promoters, even promoters from heterologous organisms. For expression in plants, the nucleic acid molecule must, as described above, be linked operably to or comprise a suitable promoter which expresses the gene at the right point in time and with the required spatial expression pattern.

[0100] For the identification of functionally equivalent promoters, the promoter strength and/or expression pattern of a candidate promoter may be analysed for example by operably linking the promoter to a reporter gene and assaying the expression level and pattern of the reporter gene in various tissues of the plant. Suitable well-known reporter genes include for example beta-glucuronidase or beta-galactosidase. The promoter activity is assayed by measuring the enzymatic activity of the beta-glucuronidase or beta-galactosidase. The promoter strength and/or expression pattern may then be compared to that of a reference promoter (such as the one used in the methods of the present invention). Alternatively, promoter strength may be assayed by quantifying mRNA levels or by comparing mRNA levels of the nucleic acid used in the methods of the present invention, with mRNA levels of housekeeping genes such as 18S rRNA, using methods known in the art, such as Northern blotting with densitometric analysis of autoradiograms, quantitative real-time PCR or RT-PCR (Heid et al., 1996 Genome Methods 6: 986-994). Generally by “weak promoter” is intended a promoter that drives expression of a coding sequence at a low level. By “low level” is intended at levels of about 1/10,000 transcripts to about 1/100,000 transcripts, to about 1/500,0000 transcripts per cell. Conversely, a “strong promoter” drives expression of a coding sequence at high level, or at about 1/10 transcripts to about 1/100 transcripts to about 1/1000 transcripts per cell. Generally, by “medium strength promoter” is intended a promoter that drives expression of a coding sequence at a lower level than a strong promoter, in particular at a level that is in all instances below that obtained when under the control of a 35S CaMV promoter.

[0101] Operably Linked

[0102] The term “operably linked” as used herein refers to a functional linkage between the promoter sequence and the gene of interest, such that the promoter sequence is able to initiate transcription of the gene of interest.

[0103] Constitutive Promoter

[0104] A “constitutive promoter” refers to a promoter that is transcriptionally active during most, but not necessarily all, phases of growth and development and under most environmental conditions, in at least one cell, tissue or organ. Table 2a below gives examples of constitutive promoters.

TABLE 2a
Examples of constitutive promoters

| Gene Source | Reference |
|---|---|
| Actin | McElroy et al, Plant Cell, 2: 163-171, 1990 |
| HMGP | WO 2004/070039 |
| CAMV 35S | Odell et al, Nature, 313: 810-812, 1985 |
| CaMV 19S | Nilsson et al., Physiol. Plant. |
| | 100: 456-462, 1997 |
| GOS2 | de Pater et al, Plant J Nov; 2(6): 837-44, |
| | 1992, WO 2004/065596 |
| Ubiquitin | Christensen et al, Plant Mol. Biol. 18: |
| | 675-689, 1992 |
| Rice cyclophilin | Buchholz et al, Plant Mol Biol. 25(5): |
| | 837-43, 1994 |
| Maize H3 histone | Lepetit et al, Mol. Gen. Genet. |
| | 231: 276-285, 1992 |
| Alfalfa H3 histone | Wu et al. Plant Mol. Biol. 11: 641-649, 1988 |
| Actin 2 | An et al, Plant J. 10(1); 107-121, 1996 |
| 34S FMV | Sanger et al., Plant. Mol. Biol., 14, |
| | 1990: 433-443 |
| Rubisco small subunit | U.S. Pat. No. 4,962,028 |
| OCS | Leisner (1988) Proc Natl Acad Sci |
| | USA 85(5): 2553 |
| SAD1 | Jain et al., Crop Science, 39 (6), 1999: 1696 |
| SAD2 | Jain et al., Crop Science, 39 (6), 1999: 1696 |
| nos | Shaw et al. (1984) Nucleic Acids Res. |
| | 12(20): 7831-7846 |
| V-ATPase | WO 01/14572 |
| Super promoter | WO 95/14098 |
| G-box proteins | WO 94/12015 |

[0105] Ubiquitous Promoter

[0106] A ubiquitous promoter is active in substantially all tissues or cells of an organism.

[0107] Developmentally-Regulated Promoter

[0108] A developmentally-regulated promoter is active during certain developmental stages or in parts of the plant that undergo developmental changes.

[0109] Inducible Promoter

[0110] An inducible promoter has induced or increased transcription initiation in response to a chemical (for a review see Gatz 1997, Annu. Rev. Plant Physiol. Plant Mol. Biol., 48:89-108), environmental or physical stimulus, or may be “stress-inducible”, i.e. activated when a plant is exposed to various stress conditions, or a “pathogen-inducible” i.e. activated when a plant is exposed to exposure to various pathogens.

[0111] Organ-Specific/Tissue-Specific Promoter

[0112] An organ-specific or tissue-specific promoter is one that is capable of preferentially initiating transcription in certain organs or tissues, such as the leaves, roots, seed tissue etc. For example, a “root-specific promoter” is a promoter that is transcriptionally active predominantly in plant roots, substantially to the exclusion of any other parts of a plant, whilst still allowing for any leaky expression in these other plant parts. Promoters able to initiate transcription in certain cells only are referred to herein as “cell-specific”.

[0113] Examples of root-specific promoters are listed in Table 2b below:

TABLE 2b
Examples of root-specific promoters

| Gene Source | Reference |
|---|---|
| RCc3 | Plant Mol Biol. 1995 Jan; 27(2): 237-48 |
| Arabidopsis PHT1 | Koyama et al. J Biosci Bioeng. |
| | 2005 Jan; 99(1): 38-42.; Mudge et al. |
| | (2002, Plant J. 31: 341) |
| Medicago phosphate | Xiao et al., 2006, Plant Biol (Stuttg). |
| transporter | 2006 Jul; 8(4): 439-49 |
| Arabidopsis Pyk10 | Nitz et al. (2001) Plant Sci |
| | 161(2): 337-346 |
| root-expressible genes | Tingey et al., EMBO J. 6: 1, 1987. |
| tobacco auxin- | Van der Zaal et al., Plant Mol. Biol. |
| inducible gene | 16, 983, 1991. |
| β-tubulin | Oppenheimer, et al., Gene 63: 87, 1988. |
| tobacco root-specific genes | Conkling, et al., Plant Physiol. |
| | 93: 1203, 1990. |
| B. napus G1-3b gene | U.S. Pat. No. 5,401,836 |
| SbPRP1 | Suzuki et al., Plant Mol. Biol. |
| | 21: 109-119, 1993. |
| LRX1 | Baumberger et al. 2001, Genes & |
| | Dev. 15: 1128 |
| BTG-26 Brassica napus | US 20050044585 |
| LeAMT1 (tomato) | Lauter et al. (1996, PNAS 3: 8139) |
| The LeNRT1-1 (tomato) | Lauter et al. (1996, PNAS 3: 8139) |
| class I patatin gene (potato) | Liu et al., Plant Mol. Biol. 17 |
| | (6): 1139-1154 |
| KDC1 (Daucus carota) | Downey et al. (2000, J. Biol. |
| | Chem. 275: 39420) |
| TobRB7 gene | W Song (1997) PhD Thesis, North |
| | Carolina State University, Raleigh, |
| | NC USA |
| OsRAB5a (rice) | Wang et al. 2002, Plant Sci. 163: 273 |
| ALF5 (Arabidopsis) | Diener et al. (2001, Plant Cell 13: 1625) |
| NRT2; 1Np | Quesada et al. (1997, Plant Mol. |
| (N. plumbaginifolia) | Biol. 34: 265) |

[0114] A seed-specific promoter is transcriptionally active predominantly in seed tissue, but not necessarily exclusively in seed tissue (in cases of leaky expression). The seed-specific promoter may be active during seed development and/or during germination. The seed specific promoter may be endosperm/aleurone/embryo specific. Examples of seed-specific promoters (endosperm/aleurone/embryo specific) are shown in Table 2c to Table 2f below. Further examples of seed-specific promoters are given in Qing Qu and Takaiwa (Plant Biotechnol. J. 2, 113-125, 2004), which disclosure is incorporated by reference herein as if fully set forth.

TABLE 2c
Examples of seed-specific promoters

| Gene source | Reference |
|---|---|
| seed-specific genes | Simon et al., Plant Mol. Biol. |
| | 5: 191, 1985; Scofield et al., |
| | J. Biol. Chem. 262: 12202, |
| | 1987.; Baszczynski et al., |
| | Plant Mol. Biol. 14: 633, |
| | 1990. |
| Brazil Nut albumin | Pearson et al., Plant Mol. Biol. |
| | 18: 235-245, 1992. |
| legumin | Ellis et al., Plant Mol. Biol. |
| | 10: 203-214, 1988. |
| glutelin (rice) | Takaiwa et al., Mol. Gen. Genet. |
| | 208: 15-22, 1986; Takaiwa et al., |
| | FEBS Letts. 221: 43-47, 1987. |
| zein | Matzke et al Plant Mol Biol, |
| | 14(3): 323-32 1990 |
| napA | Stalberg et al, Planta 199: 515-519, 1996. |
| wheat LMW and HMW | Mol Gen Genet 216: 81-90, 1989; |
| glutenin-1 | NAR 17: 461-2, 1989 |
| wheat SPA | Albani et al, Plant Cell, 9: 171-184, 1997 |
| wheat α, β, γ-gliadins | EMBO J. 3: 1409-15, 1984 |
| barley Itr1 promoter | Diaz et al. (1995) Mol Gen Genet |
| | 248(5): 592-8 |
| barley B1, C, D, hordein | Theor Appl Gen 98: 1253-62, 1999; |
| | Plant J 4: 343-55,1993; Mol Gen |
| | Genet 250: 750-60, 1996 |
| barley DOF | Mena et al, The Plant Journal, 116(1): |
| | 53-62, 1998 |
| blz2 | EP99106056.7 |
| synthetic promoter | Vicente-Carbajosa et al., Plant J. 13: |
| | 629-640, 1998. |
| rice prolamin NRP33 | Wu et al, Plant Cell Physiology 39(8) |
| | 885-889, 1998 |
| rice a-globulin Glb-1 | Wu et al, Plant Cell Physiology 39(8) |
| | 885-889, 1998 |
| rice OSH1 | Sato et al, Proc. Natl. Acad. Sci. |
| | USA, 93: 8117-8122, 1996 |
| rice α-globulin | Nakase et al. Plant Mol. Biol. |
| REB/OHP-1 | 33: 513-522, 1997 |
| rice ADP-glucose | Trans Res 6: 157-68, 1997 |
| pyrophosphorylase | |
| maize ESR gene family | Plant J 12: 235-46, 1997 |
| sorghum α-kafirin | DeRose et al., Plant Mol. Biol |
| | 32: 1029-35, 1996 |
| KNOX | Postma-Haarsma et al, Plant Mol. Biol. |
| | 39: 257-71, 1999 |
| rice oleosin | Wu et al, J. Biochem. 123: 386, 1998 |
| sunflower oleosin | Cummins et al., Plant Mol. Biol. 19: |
| | 873-876, 1992 |
| PRO0117, putative | WO 2004/070039 |
| rice 40S ribosomal | |
| protein | |
| PRO0136, rice alanine | unpublished |
| aminotransferase | |
| PRO0147, | unpublished |
| trypsin inhibitor | |
| ITR1 (barley) | |
| PRO0151, rice WSI18 | WO 2004/070039 |
| PRO0175, rice RAB21 | WO 2004/070039 |
| PRO005 | WO 2004/070039 |
| PRO0095 | WO 2004/070039 |
| α-amylase (Amy32b) | Lanahan et al, Plant Cell 4: 203-211, |
| | 1992; Skriver et al, Proc Natl Acad Sci |
| | USA 88: 7266-7270, 1991 |
| cathepsin β-like gene | Cejudo et al, Plant Mol |
| | Biol 20: 849-856, 1992 |
| Barley Ltp2 | Kalla et al., Plant J. 6: 849-60, 1994 |
| Chi26 | Leah et al., Plant J. 4: 579-89, 1994 |
| Maize B-Peru | Selinger et al., Genetics |
| | 149; 1125-38, 1998 |

TABLE 2d
examples of endosperm-specific promoters

| Gene source | Reference |
|---|---|
| glutelin (rice) | Takaiwa et al. (1986) Mol Gen Genet |
| | 208: 15-22; Takaiwa et al. (1987) |
| | FEBS Letts. 221: 43-47 |
| zein | Matzke et al., (1990) Plant Mol Biol |
| | 14(3): 323-32 |
| wheat LMW and | Colot et al. (1989) Mol Gen Genet |
| HMW glutenin-1 | 216: 81-90, Anderson et al. (1989) |
| | NAR 17: 461-2 |
| wheat SPA | Albani et al. (1997) Plant Cell 9: 171-184 |
| wheat gliadins | Rafalski et al. (1984) EMBO 3: 1409-15 |
| barley Itr1 promoter | Diaz et al. (1995) Mol Gen Genet |
| | 248(5): 592-8 |
| barley B1, C, D, hordein | Cho et al. (1999) Theor Appl Genet |
| | 98: 1253-62; |
| | Muller et al. (1993) Plant J 4: 343-55; |
| | Sorenson et al. (1996) Mol Gen Genet |
| | 250: 750-60 |
| barley DOF | Mena et al, (1998) Plant J 116(1): 53-62 |
| blz2 | Onate et al. (1999) J Biol Chem |
| | 274(14): 9175-82 |
| synthetic promoter | Vicente-Carbajosa et al. (1998) |
| | Plant J 13: 629-640 |
| rice prolamin NRP33 | Wu et al, (1998) Plant Cell Physiol |
| | 39(8) 885-889 |
| rice globulin Glb-1 | Wu et al. (1998) Plant Cell Physiol |
| | 39(8) 885-889 |
| rice globulin REB/OHP-1 | Nakase et al. (1997) Plant Molec |
| | Biol 33: 513-522 |
| rice ADP-glucose | Russell et al. (1997) Trans Res 6: 157-68 |
| pyrophosphorylase | |
| maize ESR gene family | Opsahl-Ferstad et al. (1997) Plant J |
| | 12: 235-46 |
| sorghum kafirin | DeRose et al. (1996) Plant Mol Biol |
| | 32: 1029-35 |

TABLE 2e
Examples of embryo specific promoters:

| Gene source | Reference |
|---|---|
| rice OSH1 | Sato et al, Proc. Natl. Acad. Sci. USA, 93: 8117-8122, 1996 |
| KNOX | Postma-Haarsma et al, Plant Mol. Biol. 39: 257-71, 1999 |
| PRO0151 | WO 2004/070039 |
| PRO0175 | WO 2004/070039 |
| PRO005 | WO 2004/070039 |
| PRO0095 | WO 2004/070039 |

TABLE 2f
Examples of aleurone-specific promoters:

| Gene source | Reference |
|---|---|
| α-amylase (Amy32b) | Lanahan et al, Plant Cell |
| | 4: 203-211, 1992; Skriver |
| | et al, Proc Natl Acad Sci |
| | USA 88: 7266-7270, 1991 |
| cathepsin β-like gene | Cejudo et al, Plant Mol Biol |
| | 20: 849-856, 1992 |
| Barley Ltp2 | Kalla et al., Plant J. 6: 849-60, 1994 |
| Chi26 | Leah et al., Plant J. 4: 579-89, 1994 |
| Maize B-Peru | Selinger et al., Genetics 149; |
| | 1125-38, 1998 |

[0115] A green tissue-specific promoter as defined herein is a promoter that is transcriptionally active predominantly in green tissue, substantially to the exclusion of any other parts of a plant, whilst still allowing for any leaky expression in these other plant parts.

[0116] Examples of green tissue-specific promoters which may be used to perform the methods of the invention are shown in Table 2g below.

TABLE 2g
Examples of green tissue-specific promoters

| Gene | Expression | Reference |
|---|---|---|
| Maize Orthophosphate | Leaf specific | Fukavama et al., Plant Physiol. |
| dikinase | | 2001 Nov; 127(3): 1136-46 |
| Maize Phospho- | Leaf specific | Kausch et al., Plant Mol Biol. |
| enolpyruvate | | 2001 Jan; 45(1): 1-15 |
| carboxylase | | |
| Rice Phospho- | Leaf specific | Lin et al., 2004 DNA Seq. |
| enolpyruvate | | 2004 Aug; 15(4): 269-76 |
| carboxylase | | |
| Rice small | Leaf specific | Nomura et al., Plant Mol Biol. |
| subunit Rubisco | | 2000 Sep; 44(1): 99-106 |
| rice beta expansin | Shoot specific | WO 2004/070039 |
| EXBP9 | | |
| Pigeonpea small | Leaf specific | Panguluri et al., Indian J Exp |
| subunit Rubisco | | Biol. 2005 Apr; 43(4): 369-72 |
| Pea RBCS3A | Leaf specific | |

[0117] Another example of a tissue-specific promoter is a meristem-specific promoter, which is transcriptionally active predominantly in meristematic tissue, substantially to the exclusion of any other parts of a plant, whilst still allowing for any leaky expression in these other plant parts. Examples of green meristem-specific promoters which may be used to perform the methods of the invention are shown in Table 2h below.

TABLE 2h
Examples of meristem-specific promoters

| Gene source | Expression pattern | Reference |
|---|---|---|
| rice OSH1 | Shoot apical meristem, | Sato et al. (1996) Proc. |
| | from embryo globular | Natl. Acad. Sci. USA, |
| | stage to seedling stage | 93: 8117-8122 |
| Rice metallothionein | Meristem specific | BAD87835.1 |
| WAK1 & WAK 2 | Shoot and root apical | Wagner & Kohorn |
| | meristems, and in | (2001) Plant Cell |
| | expanding leaves and | 13(2): 303-318 |
| | sepals | |

[0118] Terminator

[0119] The term “terminator” encompasses a control sequence which is a DNA sequence at the end of a transcriptional unit which signals 3′ processing and polyadenylation of a primary transcript and termination of transcription. The terminator can be derived from the natural gene, from a variety of other plant genes, or from T-DNA. The terminator to be added may be derived from, for example, the nopaline synthase or octopine synthase genes, or alternatively from another plant gene, or less preferably from any other eukaryotic gene.

[0120] Selectable Marker (Gene)/Reporter Gene

[0121] “Selectable marker”, “selectable marker gene” or “reporter gene” includes any gene that confers a phenotype on a cell in which it is expressed to facilitate the identification and/or selection of cells that are transfected or transformed with a nucleic acid construct of the invention. These marker genes enable the identification of a successful transfer of the nucleic acid molecules via a series of different principles. Suitable markers may be selected from markers that confer antibiotic or herbicide resistance, that introduce a new metabolic trait or that allow visual selection. Examples of selectable marker genes include genes conferring resistance to antibiotics (such as nptII that phosphorylates neomycin and kanamycin, or hpt, phosphorylating hygromycin, or genes conferring resistance to, for example, bleomycin, streptomycin, tetracyclin, chloramphenicol, ampicillin, gentamycin, geneticin (G418), spectinomycin or blasticidin), to herbicides (for example bar which provides resistance to Basta®; aroA or gox providing resistance against glyphosate, or the genes conferring resistance to, for example, imidazolinone, phosphinothricin or sulfonylurea), or genes that provide a metabolic trait (such as manA that allows plants to use mannose as sole carbon source or xylose isomerase for the utilisation of xylose, or antinutritive markers such as the resistance to 2-deoxyglucose). Expression of visual marker genes results in the formation of colour (for example β-glucuronidase, GUS or β-galactosidase with its coloured substrates, for example X-Gal), luminescence (such as the luciferin/luceferase system) or fluorescence (Green Fluorescent Protein, GFP, and derivatives thereof). This list represents only a small number of possible markers. The skilled worker is familiar with such markers. Different markers are preferred, depending on the organism and the selection method.

[0122] It is known that upon stable or transient integration of nucleic acids into plant cells, only a minority of the cells takes up the foreign DNA and, if desired, integrates it into its genome, depending on the expression vector used and the transfection technique used. To identify and select these integrants, a gene coding for a selectable marker (such as the ones described above) is usually introduced into the host cells together with the gene of interest. These markers can for example be used in mutants in which these genes are not functional by, for example, deletion by conventional methods. Furthermore, nucleic acid molecules encoding a selectable marker can be introduced into a host cell on the same vector that comprises the sequence encoding the polypeptides of the invention or used in the methods of the invention, or else in a separate vector. Cells which have been stably transfected with the introduced nucleic acid can be identified for example by selection (for example, cells which have integrated the selectable marker survive whereas the other cells die).

[0123] Since the marker genes, particularly genes for resistance to antibiotics and herbicides, are no longer required or are undesired in the transgenic host cell once the nucleic acids have been introduced successfully, the process according to the invention for introducing the nucleic acids advantageously employs techniques which enable the removal or excision of these marker genes. One such a method is what is known as co-transformation. The co-transformation method employs two vectors simultaneously for the transformation, one vector bearing the nucleic acid according to the invention and a second bearing the marker gene(s). A large proportion of transformants receives or, in the case of plants, comprises (up to 40% or more of the transformants), both vectors. In case of transformation with Agrobacteria, the transformants usually receive only a part of the vector, i.e. the sequence flanked by the T-DNA, which usually represents the expression cassette. The marker genes can subsequently be removed from the transformed plant by performing crosses. In another method, marker genes integrated into a transposon are used for the transformation together with desired nucleic acid (known as the Ac/Ds technology). The transformants can be crossed with a transposase source or the transformants are transformed with a nucleic acid construct conferring expression of a transposase, transiently or stable. In some cases (approx. 10%), the transposon jumps out of the genome of the host cell once transformation has taken place successfully and is lost. In a further number of cases, the transposon jumps to a different location. In these cases the marker gene must be eliminated by performing crosses. In microbiology, techniques were developed which make possible, or facilitate, the detection of such events. A further advantageous method relies on what is known as recombination systems; whose advantage is that elimination by crossing can be dispensed with. The best-known system of this type is what is known as the Cre/lox system. Cre1 is a recombinase that removes the sequences located between the loxP sequences. If the marker gene is integrated between the loxP sequences, it is removed once transformation has taken place successfully, by expression of the recombinase. Further recombination systems are the HIN/HIX, FLP/FRT and REP/STB system (Tribble et al., J. Biol. Chem., 275, 2000: 22255-22267; Velmurugan et al., J. Cell Biol., 149, 2000: 553-566). A site-specific integration into the plant genome of the nucleic acid sequences according to the invention is possible. Naturally, these methods can also be applied to microorganisms such as yeast, fungi or bacteria.

[0124] Transgenic/Transgene/Recombinant

[0125] For the purposes of the invention, “transgenic”, “transgene” or “recombinant” means with regard to, for example, a nucleic acid sequence, an expression cassette, gene construct or a vector comprising the nucleic acid sequence or an organism transformed with the nucleic acid sequences, expression cassettes or vectors according to the invention, all those constructions brought about by recombinant methods in which either
[0126] (a) the nucleic acid sequences encoding proteins useful in the methods of the invention, or
[0127] (b) genetic control sequence(s) which is operably linked with the nucleic acid sequence according to the invention, for example a promoter, or
[0128] (c) a) and b)

[0129] are not located in their natural genetic environment or have been modified by recombinant methods, it being possible for the modification to take the form of, for example, a substitution, addition, deletion, inversion or insertion of one or more nucleotide residues. The natural genetic environment is understood as meaning the natural genomic or chromosomal locus in the original plant or the presence in a genomic library. In the case of a genomic library, the natural genetic environment of the nucleic acid sequence is preferably retained, at least in part. The environment flanks the nucleic acid sequence at least on one side and has a sequence length of at least 50 bp, preferably at least 500 bp, especially preferably at least 1000 bp, most preferably at least 5000 bp. A naturally occurring expression cassette—for example the naturally occurring combination of the natural promoter of the nucleic acid sequences with the corresponding nucleic acid sequence encoding a polypeptide useful in the methods of the present invention, as defined above—becomes a transgenic expression cassette when this expression cassette is modified by non-natural, synthetic (“artificial”) methods such as, for example, mutagenic treatment. Suitable methods are described, for example, in U.S. Pat. No. 5,565,350 or WO 00/15815.

[0130] A transgenic plant for the purposes of the invention is thus understood as meaning, as above, that the nucleic acids used in the method of the invention are not present in, or originating from, the genome of said plant, or are present in the genome of said plant but not at their natural locus in the genome of said plant, it being possible for the nucleic acids to be expressed homologously or heterologously. However, as mentioned, transgenic also means that, while the nucleic acids according to the invention or used in the inventive method are at their natural position in the genome of a plant, the sequence has been modified with regard to the natural sequence, and/or that the regulatory sequences of the natural sequences have been modified. Transgenic is preferably understood as meaning the expression of the nucleic acids according to the invention at an unnatural locus in the genome, i.e. homologous or, preferably, heterologous expression of the nucleic acids takes place. Preferred transgenic plants are mentioned herein.

[0131] Modulation

[0132] The term “modulation” means in relation to expression or gene expression, a process in which the expression level is changed by said gene expression in comparison to the control plant, the expression level may be increased or decreased. The original, unmodulated expression may be of any kind of expression of a structural RNA (rRNA, tRNA) or mRNA with subsequent translation. For the purposes of this invention, the original unmodulated expression may also be absence of any expression. The term “modulating the activity” shall mean any change of the expression of the inventive nucleic acid sequences or encoded proteins, which leads to increased yield and/or increased growth of the plants. The expression can increase from zero (absence of, or immeasurable expression) to a certain amount, or can decrease from a certain amount to immeasurable small amounts or zero.

[0133] Expression

[0134] The term “expression” or “gene expression” means the transcription of a specific gene or specific genes or specific genetic construct. The term “expression” or “gene expression” in particular means the transcription of a gene or genes or genetic construct into structural RNA (rRNA, tRNA) or mRNA with or without subsequent translation of the latter into a protein. The process includes transcription of DNA and processing of the resulting mRNA product.

[0135] Increased Expression/Overexpression

[0136] The term “increased expression” or “overexpression” as used herein means any form of expression that is additional to the original wild-type expression level. For the purposes of this invention, the original wild-type expression level might also be zero (absence of expression or immeasurable expression).

[0137] Methods for increasing expression of genes or gene products are well documented in the art and include, for example, overexpression driven by appropriate promoters, the use of transcription enhancers or translation enhancers. Isolated nucleic acids which serve as promoter or enhancer elements may be introduced in an appropriate position (typically upstream) of a non-heterologous form of a polynucleotide so as to upregulate expression of a nucleic acid encoding the polypeptide of interest. For example, endogenous promoters may be altered in vivo by mutation, deletion, and/or substitution (see, Kmiec, U.S. Pat. No. 5,565,350; Zarling et al., WO9322443), or isolated promoters may be introduced into a plant cell in the proper orientation and distance from a gene of the present invention so as to control the expression of the gene.

[0138] If polypeptide expression is desired, it is generally desirable to include a polyadenylation region at the 3′-end of a polynucleotide coding region. The polyadenylation region can be derived from the natural gene, from a variety of other plant genes, or from T-DNA. The 3′ end sequence to be added may be derived from, for example, the nopaline synthase or octopine synthase genes, or alternatively from another plant gene, or less preferably from any other eukaryotic gene.

[0139] An intron sequence may also be added to the 5′ untranslated region (UTR) or the coding sequence of the partial coding sequence to increase the amount of the mature message that accumulates in the cytosol. Inclusion of a spliceable intron in the transcription unit in both plant and animal expression constructs has been shown to increase gene expression at both the mRNA and protein levels up to 1000-fold (Buchman and Berg (1988) Mol. Cell. biol. 8: 4395-4405; Callis et al. (1987) Genes Dev 1:1183-1200). Such intron enhancement of gene expression is typically greatest when placed near the 5′ end of the transcription unit. Use of the maize introns Adh1-S intron 1, 2, and 6, the Bronze-1 intron are known in the art.

For general information see: The Maize Handbook, Chapter 116, Freeling and Walbot, Eds., Springer, N.Y. (1994).

[0140] Decreased Expression

[0141] Reference herein to “decreased expression” or “reduction or substantial elimination” of expression is taken to mean a decrease in endogenous gene expression and/or polypeptide levels and/or polypeptide activity relative to control plants. The reduction or substantial elimination is in increasing order of preference at least 10%, 20%, 30%, 40% or 50%, 60%, 70%, 80%, 85%, 90%, or 95%, 96%, 97%, 98%, 99% or more reduced compared to that of control plants.

[0142] For the reduction or substantial elimination of expression an endogenous gene in a plant, a sufficient length of substantially contiguous nucleotides of a nucleic acid sequence is required. In order to perform gene silencing, this may be as little as 20, 19, 18, 17, 16, 15, 14, 13, 12, 11, 10 or fewer nucleotides, alternatively this may be as much as the entire gene (including the 5′ and/or 3′ UTR, either in part or in whole). The stretch of substantially contiguous nucleotides may be derived from the nucleic acid encoding the protein of interest (target gene), or from any nucleic acid capable of encoding an orthologue, paralogue or homologue of the protein of interest. Preferably, the stretch of substantially contiguous nucleotides is capable of forming hydrogen bonds with the target gene (either sense or antisense strand), more preferably, the stretch of substantially contiguous nucleotides has, in increasing order of preference, 50%, 60%, 70%, 80%, 85%, 90%, 95%, 96%, 97%, 98%, 99%, 100% sequence identity to the target gene (either sense or antisense strand). A nucleic acid sequence encoding a (functional) polypeptide is not a requirement for the various methods discussed herein for the reduction or substantial elimination of expression of an endogenous gene.

[0143] This reduction or substantial elimination of expression may be achieved using routine tools and techniques. A preferred method for the reduction or substantial elimination of endogenous gene expression is by introducing and expressing in a plant a genetic construct into which the nucleic acid (in this case a stretch of substantially contiguous nucleotides derived from the gene of interest, or from any nucleic acid capable of encoding an orthologue, paralogue or homologue of any one of the protein of interest) is cloned as an inverted repeat (in part or completely), separated by a spacer (non-coding DNA).

[0144] In such a preferred method, expression of the endogenous gene is reduced or substantially eliminated through RNA-mediated silencing using an inverted repeat of a nucleic acid or a part thereof (in this case a stretch of substantially contiguous nucleotides derived from the gene of interest, or from any nucleic acid capable of encoding an orthologue, paralogue or homologue of the protein of interest), preferably capable of forming a hairpin structure. The inverted repeat is cloned in an expression vector comprising control sequences. A non-coding DNA nucleic acid sequence (a spacer, for example a matrix attachment region fragment (MAR), an intron, a polylinker, etc.) is located between the two inverted nucleic acids forming the inverted repeat. After transcription of the inverted repeat, a chimeric RNA with a self-complementary structure is formed (partial or complete). This double-stranded RNA structure is referred to as the hairpin RNA (hpRNA). The hpRNA is processed by the plant into siRNAs that are incorporated into an RNA-induced silencing complex (RISC). The RISC further cleaves the mRNA transcripts, thereby substantially reducing the number of mRNA transcripts to be translated into polypeptides. For further general details see for example, Grierson et al. (1998) WO 98/53083; Waterhouse et al. (1999) WO 99/53050).

[0145] Performance of the methods of the invention does not rely on introducing and expressing in a plant a genetic construct into which the nucleic acid is cloned as an inverted repeat, but any one or more of several well-known “gene silencing” methods may be used to achieve the same effects.

[0146] One such method for the reduction of endogenous gene expression is RNA-mediated silencing of gene expression (downregulation). Silencing in this case is triggered in a plant by a double stranded RNA sequence (dsRNA) that is substantially similar to the target endogenous gene. This dsRNA is further processed by the plant into about 20 to about 26 nucleotides called short interfering RNAs (siRNAs). The siRNAs are incorporated into an RNA-induced silencing complex (RISC) that cleaves the mRNA transcript of the endogenous target gene, thereby substantially reducing the number of mRNA transcripts to be translated into a polypeptide. Preferably, the double stranded RNA sequence corresponds to a target gene.

[0147] Another example of an RNA silencing method involves the introduction of nucleic acid sequences or parts thereof (in this case a stretch of substantially contiguous nucleotides derived from the gene of interest, or from any nucleic acid capable of encoding an orthologue, paralogue or homologue of the protein of interest) in a sense orientation into a plant. “Sense orientation” refers to a DNA sequence that is homologous to an mRNA transcript thereof. Introduced into a plant would therefore be at least one copy of the nucleic acid sequence. The additional nucleic acid sequence will reduce expression of the endogenous gene, giving rise to a phenomenon known as co-suppression. The reduction of gene expression will be more pronounced if several additional copies of a nucleic acid sequence are introduced into the plant, as there is a positive correlation between high transcript levels and the triggering of co-suppression.

[0148] Another example of an RNA silencing method involves the use of antisense nucleic acid sequences. An “antisense” nucleic acid sequence comprises a nucleotide sequence that is complementary to a “sense” nucleic acid sequence encoding a protein, i.e. complementary to the coding strand of a double-stranded cDNA molecule or complementary to an mRNA transcript sequence. The antisense nucleic acid sequence is preferably complementary to the endogenous gene to be silenced. The complementarity may be located in the “coding region” and/or in the “non-coding region” of a gene. The term “coding region” refers to a region of the nucleotide sequence comprising codons that are translated into amino acid residues. The term “non-coding region” refers to 5′ and 3′ sequences that flank the coding region that are transcribed but not translated into amino acids (also referred to as 5′ and 3′ untranslated regions).

[0149] Antisense nucleic acid sequences can be designed according to the rules of Watson and Crick base pairing. The antisense nucleic acid sequence may be complementary to the entire nucleic acid sequence (in this case a stretch of substantially contiguous nucleotides derived from the gene of interest, or from any nucleic acid capable of encoding an orthologue, paralogue or homologue of the protein of interest), but may also be an oligonucleotide that is antisense to only a part of the nucleic acid sequence (including the mRNA 5′ and 3′ UTR). For example, the antisense oligonucleotide sequence may be complementary to the region surrounding the translation start site of an mRNA transcript encoding a polypeptide. The length of a suitable antisense oligonucleotide sequence is known in the art and may start from about 50, 45, 40, 35, 30, 25, 20, 15 or 10 nucleotides in length or less. An antisense nucleic acid sequence according to the invention may be constructed using chemical synthesis and enzymatic ligation reactions using methods known in the art. For example, an antisense nucleic acid sequence (e.g., an antisense oligonucleotide sequence) may be chemically synthesized using naturally occurring nucleotides or variously modified nucleotides designed to increase the biological stability of the molecules or to increase the physical stability of the duplex formed between the antisense and sense nucleic acid sequences, e.g., phosphorothioate derivatives and acridine substituted nucleotides may be used. Examples of modified nucleotides that may be used to generate the antisense nucleic acid sequences are well known in the art. Known nucleotide modifications include methylation, cyclization and ‘caps’ and substitution of one or more of the naturally occurring nucleotides with an analogue such as inosine. Other modifications of nucleotides are well known in the art.

[0150] The antisense nucleic acid sequence can be produced biologically using an expression vector into which a nucleic acid sequence has been subcloned in an antisense orientation (i.e., RNA transcribed from the inserted nucleic acid will be of an antisense orientation to a target nucleic acid of interest). Preferably, production of antisense nucleic acid sequences in plants occurs by means of a stably integrated nucleic acid construct comprising a promoter, an operably linked antisense oligonucleotide, and a terminator.

[0151] The nucleic acid molecules used for silencing in the methods of the invention (whether introduced into a plant or generated in situ) hybridize with or bind to mRNA transcripts and/or genomic DNA encoding a polypeptide to thereby inhibit expression of the protein, e.g., by inhibiting transcription and/or translation. The hybridization can be by conventional nucleotide complementarity to form a stable duplex, or, for example, in the case of an antisense nucleic acid sequence which binds to DNA duplexes, through specific interactions in the major groove of the double helix. Antisense nucleic acid sequences may be introduced into a plant by transformation or direct injection at a specific tissue site. Alternatively, antisense nucleic acid sequences can be modified to target selected cells and then administered systemically. For example, for systemic administration, antisense nucleic acid sequences can be modified such that they specifically bind to receptors or antigens expressed on a selected cell surface, e.g., by linking the antisense nucleic acid sequence to peptides or antibodies which bind to cell surface receptors or antigens. The antisense nucleic acid sequences can also be delivered to cells using the vectors described herein.

[0152] According to a further aspect, the antisense nucleic acid sequence is an a-anomeric nucleic acid sequence. An a-anomeric nucleic acid sequence forms specific double-stranded hybrids with complementary RNA in which, contrary to the usual b-units, the strands run parallel to each other (Gaultier et al. (1987) Nucl Ac Res 15: 6625-6641). The antisense nucleic acid sequence may also comprise a 2′-o-methylribonucleotide (Inoue et al. (1987) Nucl Ac Res 15, 6131-6148) or a chimeric RNA-DNA analogue (Inoue et al. (1987) FEBS Lett. 215, 327-330).

[0153] The reduction or substantial elimination of endogenous gene expression may also be performed using ribozymes. Ribozymes are catalytic RNA molecules with ribonuclease activity that are capable of cleaving a single-stranded nucleic acid sequence, such as an mRNA, to which they have a complementary region. Thus, ribozymes (e.g., hammerhead ribozymes (described in Haselhoff and Gerlach (1988) Nature 334, 585-591) can be used to catalytically cleave mRNA transcripts encoding a polypeptide, thereby substantially reducing the number of mRNA transcripts to be translated into a polypeptide. A ribozyme having specificity for a nucleic acid sequence can be designed (see for example: Cech et al. U.S. Pat. No. 4,987,071; and Cech et al. U.S. Pat. No. 5,116,742). Alternatively, mRNA transcripts corresponding to a nucleic acid sequence can be used to select a catalytic RNA having a specific ribonuclease activity from a pool of RNA molecules (Bartel and Szostak (1993) Science 261, 1411-1418). The use of ribozymes for gene silencing in plants is known in the art (e.g., Atkins et al. (1994) WO 94/00012; Lenne et al. (1995) WO 95/03404; Lutziger et al. (2000) WO 00/00619; Prinsen et al. (1997) WO 97/13865 and Scott et al. (1997) WO 97/38116).

[0154] Gene silencing may also be achieved by insertion mutagenesis (for example, T-DNA insertion or transposon insertion) or by strategies as described by, among others, Angell and Baulcombe ((1999) Plant J 20(3): 357-62), (Amplicon VIGS WO 98/36083), or Baulcombe (WO 99/15682).

[0155] Gene silencing may also occur if there is a mutation on an endogenous gene and/or a mutation on an isolated gene/nucleic acid subsequently introduced into a plant. The reduction or substantial elimination may be caused by a non-functional polypeptide. For example, the polypeptide may bind to various interacting proteins; one or more mutation(s) and/or truncation(s) may therefore provide for a polypeptide that is still able to bind interacting proteins (such as receptor proteins) but that cannot exhibit its normal function (such as signalling ligand).

[0156] A further approach to gene silencing is by targeting nucleic acid sequences complementary to the regulatory region of the gene (e.g., the promoter and/or enhancers) to form triple helical structures that prevent transcription of the gene in target cells. See Helene, C., Anticancer Drug Res. 6, 569-84, 1991; Helene et al., Ann. N.Y. Acad. Sci. 660, 27-36 1992; and Maher, L. J. Bioassays 14, 807-15, 1992.

[0157] Other methods, such as the use of antibodies directed to an endogenous polypeptide for inhibiting its function in planta, or interference in the signalling pathway in which a polypeptide is involved, will be well known to the skilled man. In particular, it can be envisaged that manmade molecules may be useful for inhibiting the biological function of a target polypeptide, or for interfering with the signalling pathway in which the target polypeptide is involved.

[0158] Alternatively, a screening program may be set up to identify in a plant population natural variants of a gene, which variants encode polypeptides with reduced activity. Such natural variants may also be used for example, to perform homologous recombination.

[0159] Artificial and/or natural microRNAs (miRNAs) may be used to knock out gene expression and/or mRNA translation. Endogenous miRNAs are single stranded small RNAs of typically 19-24 nucleotides long. They function primarily to regulate gene expression and/or mRNA translation. Most plant microRNAs (miRNAs) have perfect or near-perfect complementarity with their target sequences. However, there are natural targets with up to five mismatches. They are processed from longer non-coding RNAs with characteristic fold-back structures by double-strand specific RNases of the Dicer family. Upon processing, they are incorporated in the RNA-induced silencing complex (RISC) by binding to its main component, an Argonaute protein. mRNAs serve as the specificity components of RISC, since they base-pair to target nucleic acids, mostly mRNAs, in the cytoplasm. Subsequent regulatory events include target mRNA cleavage and destruction and/or translational inhibition. Effects of miRNA overexpression are thus often reflected in decreased mRNA levels of target genes.

[0160] Artificial microRNAs (amiRNAs), which are typically 21 nucleotides in length, can be genetically engineered specifically to negatively regulate gene expression of single or multiple genes of interest. Determinants of plant microRNA target selection are well known in the art. Empirical parameters for target recognition have been defined and can be used to aid in the design of specific amiRNAs, (Schwab et al., Dev. Cell 8, 517-527, 2005). Convenient tools for design and generation of amiRNAs and their precursors are also available to the public (Schwab et al., Plant Cell 18, 1121-1133, 2006).

[0161] For optimal performance, the gene silencing techniques used for reducing expression in a plant of an endogenous gene requires the use of nucleic acid sequences from monocotyledonous plants for transformation of monocotyledonous plants, and from dicotyledonous plants for transformation of dicotyledonous plants. Preferably, a nucleic acid sequence from any given plant species is introduced into that same species. For example, a nucleic acid sequence from rice is transformed into a rice plant. However, it is not an absolute requirement that the nucleic acid sequence to be introduced originates from the same plant species as the plant in which it will be introduced. It is sufficient that there is substantial homology between the endogenous target gene and the nucleic acid to be introduced.

[0162] Described above are examples of various methods for the reduction or substantial elimination of expression in a plant of an endogenous gene. A person skilled in the art would readily be able to adapt the aforementioned methods for silencing so as to achieve reduction of expression of an endogenous gene in a whole plant or in parts thereof through the use of an appropriate promoter, for example.

[0163] Transformation

[0164] The term “introduction” or “transformation” as referred to herein encompasses the transfer of an exogenous polynucleotide into a host cell, irrespective of the method used for transfer.

[0165] Plant tissue capable of subsequent clonal propagation, whether by organogenesis or embryogenesis, may be transformed with a genetic construct of the present invention and a whole plant regenerated there from. The particular tissue chosen will vary depending on the clonal propagation systems available for, and best suited to, the particular species being transformed. Exemplary tissue targets include leaf disks, pollen, embryos, cotyledons, hypocotyls, megagametophytes, callus tissue, existing meristematic tissue (e.g., apical meristem, axillary buds, and root meristems), and induced meristem tissue (e.g., cotyledon meristem and hypocotyl meristem). The polynucleotide may be transiently or stably introduced into a host cell and may be maintained non-integrated, for example, as a plasmid. Alternatively, it may be integrated into the host genome. The resulting transformed plant cell may then be used to regenerate a transformed plant in a manner known to persons skilled in the art.

[0166] The transfer of foreign genes into the genome of a plant is called transformation. Transformation of plant species is now a fairly routine technique. Advantageously, any of several transformation methods may be used to introduce the gene of interest into a suitable ancestor cell. The methods described for the transformation and regeneration of plants from plant tissues or plant cells may be utilized for transient or for stable transformation. Transformation methods include the use of liposomes, electroporation, chemicals that increase free DNA uptake, injection of the DNA directly into the plant, particle gun bombardment, transformation using viruses or pollen and microprojection. Methods may be selected from the calcium/polyethylene glycol method for protoplasts (Krens, F. A. et al., (1982) Nature 296, 72-74; Negrutiu I et al. (1987) Plant Mol Biol 8: 363-373); electroporation of protoplasts (Shillito R. D. et al. (1985) Bio/Technol 3, 1099-1102); microinjection into plant material (Crossway A et al., (1986) Mol. Gen. Genet. 202: 179-185); DNA or RNA-coated particle bombardment (Klein T M et al., (1987) Nature 327: 70) infection with (non-integrative) viruses and the like. Transgenic plants, including transgenic crop plants, are preferably produced via Agrobacterium-mediated transformation. An advantageous transformation method is the transformation in planta. To this end, it is possible, for example, to allow the agrobacteria to act on plant seeds or to inoculate the plant meristem with agrobacteria. It has proved particularly expedient in accordance with the invention to allow a suspension of transformed agrobacteria to act on the intact plant or at least on the flower primordia. The plant is subsequently grown on until the seeds of the treated plant are obtained (Clough and Bent, Plant J. (1998) 16, 735-743). Methods for Agrobacterium-mediated transformation of rice include well known methods for rice transformation, such as those described in any of the following: European patent application EP 1198985 A1, Aldemita and Hodges (Planta 199: 612-617, 1996); Chan et al. (Plant Mol Biol 22 (3): 491-506, 1993), Hiei et al. (Plant J 6 (2): 271-282, 1994), which disclosures are incorporated by reference herein as if fully set forth. In the case of corn transformation, the preferred method is as described in either Ishida et al. (Nat. Biotechnol 14(6): 745-50, 1996) or Frame et al. (Plant Physiol 129(1): 13-22, 2002), which disclosures are incorporated by reference herein as if fully set forth. Said methods are further described by way of example in B. Jenes et al., Techniques for Gene Transfer, in: Transgenic Plants, Vol. 1, Engineering and Utilization, eds. S. D. Kung and R. Wu, Academic Press (1993) 128-143 and in Potrykus Annu. Rev. Plant Physiol. Plant Molec. Biol. 42 (1991) 205-225). The nucleic acids or the construct to be expressed is preferably cloned into a vector, which is suitable for transforming Agrobacterium tumefaciens, for example pBin19 (Bevan et al., Nucl. Acids Res. 12 (1984) 8711). Agrobacteria transformed by such a vector can then be used in known manner for the transformation of plants, such as plants used as a model, like Arabidopsis (Arabidopsis thaliana is within the scope of the present invention not considered as a crop plant), or crop plants such as, by way of example, tobacco plants, for example by immersing bruised leaves or chopped leaves in an agrobacterial solution and then culturing them in suitable media. The transformation of plants by means of Agrobacterium tumefaciens is described, for example, by Höfgen and Willmitzer in Nucl. Acid Res. (1988) 16, 9877 or is known inter alia from F. F. White, Vectors for Gene Transfer in Higher Plants; in Transgenic Plants, Vol. 1, Engineering and Utilization, eds. S. D. Kung and R. Wu, Academic Press, 1993, pp. 15-38.

[0167] In addition to the transformation of somatic cells, which then have to be regenerated into intact plants, it is also possible to transform the cells of plant meristems and in particular those cells which develop into gametes. In this case, the transformed gametes follow the natural plant development, giving rise to transgenic plants. Thus, for example, seeds of Arabidopsis are treated with agrobacteria and seeds are obtained from the developing plants of which a certain proportion is transformed and thus transgenic [Feldman, K A and Marks M D (1987). Mol Gen Genet. 208:1-9; Feldmann K (1992). In: C Koncz, N—H Chua and J Shell, eds, Methods in Arabidopsis Research. Word Scientific, Singapore, pp. 274-289]. Alternative methods are based on the repeated removal of the inflorescences and incubation of the excision site in the center of the rosette with transformed agrobacteria, whereby transformed seeds can likewise be obtained at a later point in time (Chang (1994). Plant J. 5: 551-558; Katavic (1994). Mol Gen Genet, 245: 363-370). However, an especially effective method is the vacuum infiltration method with its modifications such as the “floral dip” method. In the case of vacuum infiltration of Arabidopsis, intact plants under reduced pressure are treated with an agrobacterial suspension [Bechthold, N (1993). C R Acad Sci Paris Life Sci, 316: 1194-1199], while in the case of the “floral dip” method the developing floral tissue is incubated briefly with a surfactant-treated agrobacterial suspension [Clough, S J and Bent A F (1998) The Plant J. 16, 735-743]. A certain proportion of transgenic seeds are harvested in both cases, and these seeds can be distinguished from non-transgenic seeds by growing under the above-described selective conditions. In addition the stable transformation of plastids is of advantages because plastids are inherited maternally is most crops reducing or eliminating the risk of transgene flow through pollen. The transformation of the chloroplast genome is generally achieved by a process which has been schematically displayed in Klaus et al., 2004 [Nature Biotechnology 22 (2), 225-229]. Briefly the sequences to be transformed are cloned together with a selectable marker gene between flanking sequences homologous to the chloroplast genome. These homologous flanking sequences direct site specific integration into the plastome. Plastidal transformation has been described for many different plant species and an overview is given in Bock (2001) Transgenic plastids in basic research and plant biotechnology. J Mol. Biol. 2001 Sep. 21; 312 (3):425-38 or Maliga, P (2003) Progress towards commercialization of plastid transformation technology. Trends Biotechnol. 21, 20-28. Further biotechnological progress has recently been reported in form of marker free plastid transformants, which can be produced by a transient co-integrated maker gene (Klaus et al., 2004, Nature Biotechnology 22(2), 225-229).

[0168] The genetically modified plant cells can be regenerated via all methods with which the skilled worker is familiar. Suitable methods can be found in the above-mentioned publications by S. D. Kung and R. Wu, Potrykus or Höfgen and Willmitzer.

[0169] Generally after transformation, plant cells or cell groupings are selected for the presence of one or more markers which are encoded by plant-expressible genes co-transferred with the gene of interest, following which the transformed material is regenerated into a whole plant. To select transformed plants, the plant material obtained in the transformation is, as a rule, subjected to selective conditions so that transformed plants can be distinguished from untransformed plants. For example, the seeds obtained in the above-described manner can be planted and, after an initial growing period, subjected to a suitable selection by spraying. A further possibility consists in growing the seeds, if appropriate after sterilization, on agar plates using a suitable selection agent so that only the transformed seeds can grow into plants. Alternatively, the transformed plants are screened for the presence of a selectable marker such as the ones described above.

[0170] Following DNA transfer and regeneration, putatively transformed plants may also be evaluated, for instance using Southern analysis, for the presence of the gene of interest, copy number and/or genomic organisation. Alternatively or additionally, expression levels of the newly introduced DNA may be monitored using Northern and/or Western analysis, both techniques being well known to persons having ordinary skill in the art.

[0171] The generated transformed plants may be propagated by a variety of means, such as by clonal propagation or classical breeding techniques. For example, a first generation (or T1) transformed plant may be selfed and homozygous second-generation (or T2) transformants selected, and the T2 plants may then further be propagated through classical breeding techniques. The generated transformed organisms may take a variety of forms. For example, they may be chimeras of transformed cells and non-transformed cells; clonal transformants (e.g., all cells transformed to contain the expression cassette); grafts of transformed and untransformed tissues (e.g., in plants, a transformed rootstock grafted to an untransformed scion).

[0172] T-DNA Activation Tagging

[0173] T-DNA activation tagging (Hayashi et al. Science (1992) 1350-1353), involves insertion of T-DNA, usually containing a promoter (may also be a translation enhancer or an intron), in the genomic region of the gene of interest or 10 kb up- or downstream of the coding region of a gene in a configuration such that the promoter directs expression of the targeted gene. Typically, regulation of expression of the targeted gene by its natural promoter is disrupted and the gene falls under the control of the newly introduced promoter. The promoter is typically embedded in a T-DNA. This T-DNA is randomly inserted into the plant genome, for example, through Agrobacterium infection and leads to modified expression of genes near the inserted T-DNA. The resulting transgenic plants show dominant phenotypes due to modified expression of genes close to the introduced promoter.

[0174] TILLING

[0175] The term “TILLING” is an abbreviation of “Targeted Induced Local Lesions In Genomes” and refers to a mutagenesis technology useful to generate and/or identify nucleic acids encoding proteins with modified expression and/or activity. TILLING also allows selection of plants carrying such mutant variants. These mutant variants may exhibit modified expression, either in strength or in location or in timing (if the mutations affect the promoter for example). These mutant variants may exhibit higher activity than that exhibited by the gene in its natural form. TILLING combines high-density mutagenesis with high-throughput screening methods. The steps typically followed in TILLING are: (a) EMS mutagenesis (Redei G P and Koncz C (1992) In Methods in Arabidopsis Research, Koncz C, Chua N H, Schell J, eds. Singapore, World Scientific Publishing Co, pp. 16-82; Feldmann et al., (1994) In Meyerowitz E M, Somerville C R, eds, Arabidopsis. Cold Spring Harbor Laboratory Press, Cold Spring Harbor, N.Y., pp 137-172; Lightner J and Caspar T (1998) In J Martinez-Zapater, J Salinas, eds, Methods on Molecular Biology, Vol. 82. Humana Press, Totowa, N.J., pp 91-104); (b) DNA preparation and pooling of individuals; (c) PCR amplification of a region of interest; (d) denaturation and annealing to allow formation of heteroduplexes; (e) DHPLC, where the presence of a heteroduplex in a pool is detected as an extra peak in the chromatogram; (f) identification of the mutant individual; and (g) sequencing of the mutant PCR product. Methods for TILLING are well known in the art (McCallum et al., (2000) Nat Biotechnol 18: 455-457; reviewed by Stemple (2004) Nat Rev Genet. 5(2): 145-50).

[0176] Homologous Recombination

[0177] Homologous recombination allows introduction in a genome of a selected nucleic acid at a defined selected position. Homologous recombination is a standard technology used routinely in biological sciences for lower organisms such as yeast or the moss Physcomitrella. Methods for performing homologous recombination in plants have been described not only for model plants (Offring a et al. (1990) EMBO J. 9(10): 3077-84) but also for crop plants, for example rice (Terada et al. (2002) Nat Biotech 20(10): 1030-4; lida and Terada (2004) Curr Opin Biotech 15(2): 132-8), and approaches exist that are generally applicable regardless of the target organism (Miller et al, Nature Biotechnol. 25, 778-785, 2007).

[0178] Yield Related Traits

[0179] Yield related traits are traits or features which are related to plant yield. Yield related traits may comprise one or more of the following non-limitative list of features: early flowering time, yield, biomass, seed yield, early vigour, greenness index, increased growth rate, improved agronomic traits (such as e.g. increased tolerance to submergence (which leads to increased yield in rice, improved Water Use Efficiency (WUE), Nitrogen Use Efficiency (NUE), etc.).

[0180] Yield

[0181] The term “yield” in general means a measurable produce of economic value, typically related to a specified crop, to an area, and to a period of time. Individual plant parts directly contribute to yield based on their number, size and/or weight, or the actual yield is the yield per square meter for a crop and year, which is determined by dividing total production (includes both harvested and appraised production) by planted square meters. The terms “yield” of a plant and “plant yield” are used interchangeably herein and are meant to refer to vegetative biomass such as root and/or shoot biomass, to reproductive organs, and/or to propagules such as seeds of that plant.

[0182] Taking corn as an example, a yield increase may be manifested as one or more of the following: increase in the number of plants established per square meter, an increase in the number of ears per plant, an increase in the number of rows, number of kernels per row, kernel weight, thousand kernel weight, ear length/diameter, increase in the seed filling rate (which is the number of filled seeds divided by the total number of seeds and multiplied by 100), among others. Taking rice as an example, a yield increase may manifest itself as an increase in one or more of the following: number of plants per square meter, number of panicles per plant, panicle length, number of spikelets per panicle, number of flowers (florets) per panicle, increase in the seed filling rate (which is the number of filled seeds divided by the total number of seeds and multiplied by 100), increase in thousand kernel weight, among others. In rice, submergence tolerance may also result in increased yield.

[0183] Flowers in maize are unisexual; male inflorescences (tassels) originate from the apical stem and female inflorescences (ears) arise from axillary bud apices. The female inflorescence produces pairs of spikelets on the surface of a central axis (cob). Each of the female spikelets encloses two fertile florets, one of them will usually mature into a maize kernel once fertilized. Hence a yield increase in maize may be manifested as one or more of the following: increase in the number of plants established per square meter, an increase in the number of ears per plant, an increase in the number of rows, number of kernels per row, kernel weight, thousand kernel weight, ear length/diameter, increase in the seed filling rate, which is the number of filled florets (i.e. florets containing seed) divided by the total number of florets and multiplied by 100), among others.

[0184] Inflorescences in rice plants are named panicles. The panicle bears spikelets, which are the basic units of the panicles, and which consist of a pedicel and a floret. The floret is borne on the pedicel and includes a flower that is covered by two protective glumes: a larger glume (the lemma) and a shorter glume (the palea). Hence, taking rice as an example, a yield increase may manifest itself as an increase in one or more of the following: number of plants per square meter, number of panicles per plant, panicle length, number of spikelets per panicle, number of flowers (or florets) per panicle; an increase in the seed filling rate which is the number of filled florets (i.e. florets containing seeds) divided by the total number of florets and multiplied by 100; an increase in thousand kernel weight, among others.

[0185] Early Flowering Time

[0186] Plants having an “early flowering time” as used herein are plants which start to flower earlier than control plants. Hence this term refers to plants that show an earlier start of flowering. Flowering time of plants can be assessed by counting the number of days (“time to flower”) between sowing and the emergence of a first inflorescence. The “flowering time” of a plant can for instance be determined using the method as described in WO 2007/093444.

[0187] Early Vigour

[0188] “Early vigour” refers to active healthy well-balanced growth especially during early stages of plant growth, and may result from increased plant fitness due to, for example, the plants being better adapted to their environment (i.e. optimizing the use of energy resources and partitioning between shoot and root). Plants having early vigour also show increased seedling survival and a better establishment of the crop, which often results in highly uniform fields (with the crop growing in uniform manner, i.e. with the majority of plants reaching the various stages of development at substantially the same time), and often better and higher yield. Therefore, early vigour may be determined by measuring various factors, such as thousand kernel weight, percentage germination, percentage emergence, seedling growth, seedling height, root length, root and shoot biomass and many more.

[0189] Increased Growth Rate

[0190] The increased growth rate may be specific to one or more parts of a plant (including seeds), or may be throughout substantially the whole plant. Plants having an increased growth rate may have a shorter life cycle. The life cycle of a plant may be taken to mean the time needed to grow from a dry mature seed up to the stage where the plant has produced dry mature seeds, similar to the starting material. This life cycle may be influenced by factors such as speed of germination, early vigour, growth rate, greenness index, flowering time and speed of seed maturation. The increase in growth rate may take place at one or more stages in the life cycle of a plant or during substantially the whole plant life cycle. Increased growth rate during the early stages in the life cycle of a plant may reflect enhanced vigour. The increase in growth rate may alter the harvest cycle of a plant allowing plants to be sown later and/or harvested sooner than would otherwise be possible (a similar effect may be obtained with earlier flowering time). If the growth rate is sufficiently increased, it may allow for the further sowing of seeds of the same plant species (for example sowing and harvesting of rice plants followed by sowing and harvesting of further rice plants all within one conventional growing period). Similarly, if the growth rate is sufficiently increased, it may allow for the further sowing of seeds of different plants species (for example the sowing and harvesting of corn plants followed by, for example, the sowing and optional harvesting of soybean, potato or any other suitable plant). Harvesting additional times from the same rootstock in the case of some crop plants may also be possible. Altering the harvest cycle of a plant may lead to an increase in annual biomass production per square meter (due to an increase in the number of times (say in a year) that any particular plant may be grown and harvested). An increase in growth rate may also allow for the cultivation of transgenic plants in a wider geographical area than their wild-type counterparts, since the territorial limitations for growing a crop are often determined by adverse environmental conditions either at the time of planting (early season) or at the time of harvesting (late season). Such adverse conditions may be avoided if the harvest cycle is shortened. The growth rate may be determined by deriving various parameters from growth curves, such parameters may be: T-Mid (the time taken for plants to reach 50% of their maximal size) and T-90 (time taken for plants to reach 90% of their maximal size), amongst others.

[0191] Stress Resistance

[0192] An increase in yield and/or growth rate occurs whether the plant is under non-stress conditions or whether the plant is exposed to various stresses compared to control plants. Plants typically respond to exposure to stress by growing more slowly. In conditions of severe stress, the plant may even stop growing altogether. Mild stress on the other hand is defined herein as being any stress to which a plant is exposed which does not result in the plant ceasing to grow altogether without the capacity to resume growth. Mild stress in the sense of the invention leads to a reduction in the growth of the stressed plants of less than 40%, 35%, 30% or 25%, more preferably less than 20% or 15% in comparison to the control plant under non-stress conditions. Due to advances in agricultural practices (irrigation, fertilization, pesticide treatments) severe stresses are not often encountered in cultivated crop plants. As a consequence, the compromised growth induced by mild stress is often an undesirable feature for agriculture. “Mild stresses” are the everyday biotic and/or abiotic (environmental) stresses to which a plant is exposed. Abiotic stresses may be due to drought or excess water, anaerobic stress, salt stress, chemical toxicity, oxidative stress and hot, cold or freezing temperatures.

[0193] “Biotic stresses” are typically those stresses caused by pathogens, such as bacteria, viruses, fungi, nematodes and insects.

[0194] The “abiotic stress” may be an osmotic stress caused by a water stress, e.g. due to drought, salt stress, or freezing stress. Abiotic stress may also be an oxidative stress or a cold stress. “Freezing stress” is intended to refer to stress due to freezing temperatures, i.e. temperatures at which available water molecules freeze and turn into ice. “Cold stress”, also called “chilling stress”, is intended to refer to cold temperatures, e.g. temperatures below 10°, or preferably below 5° C., but at which water molecules do not freeze. As reported in Wang et al. (Planta (2003) 218: 1-14), abiotic stress leads to a series of morphological, physiological, biochemical and molecular changes that adversely affect plant growth and productivity. Drought, salinity, extreme temperatures and oxidative stress are known to be interconnected and may induce growth and cellular damage through similar mechanisms. Rabbani et al. (Plant Physiol (2003) 133: 1755-1767) describes a particularly high degree of “cross talk” between drought stress and high-salinity stress. For example, drought and/or salinisation are manifested primarily as osmotic stress, resulting in the disruption of homeostasis and ion distribution in the cell. Oxidative stress, which frequently accompanies high or low temperature, salinity or drought stress, may cause denaturing of functional and structural proteins. As a consequence, these diverse environmental stresses often activate similar cell signalling pathways and cellular responses, such as the production of stress proteins, up-regulation of anti-oxidants, accumulation of compatible solutes and growth arrest. The term “non-stress” conditions as used herein are those environmental conditions that allow optimal growth of plants. Persons skilled in the art are aware of normal soil conditions and climatic conditions for a given location. Plants with optimal growth conditions, (grown under non-stress conditions) typically yield in increasing order of preference at least 97%, 95%, 92%, 90%, 87%, 85%, 83%, 80%, 77% or 75% of the average production of such plant in a given environment. Average production may be calculated on harvest and/or season basis. Persons skilled in the art are aware of average yield productions of a crop.

[0195] In particular, the methods of the present invention may be performed under non-stress conditions. In an example, the methods of the present invention may be performed under non-stress conditions such as mild drought to give plants having increased yield relative to control plants.

[0196] In another embodiment, the methods of the present invention may be performed under stress conditions.

[0197] In an example, the methods of the present invention may be performed under stress conditions such as drought to give plants having increased yield relative to control plants.

[0198] In another example, the methods of the present invention may be performed under stress conditions such as nutrient deficiency to give plants having increased yield relative to control plants.

[0199] Nutrient deficiency may result from a lack of nutrients such as nitrogen, phosphates and other phosphorous-containing compounds, potassium, calcium, magnesium, manganese, iron and boron, amongst others.

[0200] In yet another example, the methods of the present invention may be performed under stress conditions such as salt stress to give plants having increased yield relative to control plants. The term salt stress is not restricted to common salt (NaCl), but may be any one or more of: NaCl, KCl, LiCl, MgCl₂, CaCl₂, amongst others.

[0201] In yet another example, the methods of the present invention may be performed under stress conditions such as cold stress or freezing stress to give plants having increased yield relative to control plants.

[0202] Increase/Improve/Enhance

[0203] The terms “increase”, “improve” or “enhance” are interchangeable and shall mean in the sense of the application at least a 3%, 4%, 5%, 6%, 7%, 8%, 9% or 10%, preferably at least 15% or 20%, more preferably 25%, 30%, 35% or 40% more yield and/or growth in comparison to control plants as defined herein.

[0204] Seed Yield

[0205] Increased seed yield may manifest itself as one or more of the following:
[0206] (a) an increase in seed biomass (total seed weight) which may be on an individual seed basis and/or per plant and/or per square meter;
[0207] (b) increased number of flowers per plant;
[0208] (c) increased number of seeds and/or increased number of filled seeds;
[0209] (d) increased seed filling rate (which is expressed as the ratio between the number of filled seeds divided by the total number of seeds);
[0210] (e) increased harvest index, which is expressed as a ratio of the yield of harvestable parts, such as seeds, divided by the biomass of aboveground plant parts; and
[0211] (f) increased thousand kernel weight (TKW), which is extrapolated from the number of filled seeds counted and their total weight. An increased TKW may result from an increased seed size and/or seed weight, and may also result from an increase in embryo and/or endosperm size.

[0212] The terms “filled florets” and “filled seeds” may be considered synonyms.

[0213] An increase in seed yield may also be manifested as an increase in seed size and/or seed volume. Furthermore, an increase in seed yield may also manifest itself as an increase in seed area and/or seed length and/or seed width and/or seed perimeter.

[0214] Greenness Index

[0215] The “greenness index” as used herein is calculated from digital images of plants. For each pixel belonging to the plant object on the image, the ratio of the green value versus the red value (in the RGB model for encoding color) is calculated. The greenness index is expressed as the percentage of pixels for which the green-to-red ratio exceeds a given threshold. Under normal growth conditions, under salt stress growth conditions, and under reduced nutrient availability growth conditions, the greenness index of plants is measured in the last imaging before flowering. In contrast, under drought stress growth conditions, the greenness index of plants is measured in the first imaging after drought.

[0216] Biomass

[0217] The term “biomass” as used herein is intended to refer to the total weight of a plant. Within the definition of biomass, a distinction may be made between the biomass of one or more parts of a plant, which may include:
[0218] aboveground (harvestable) parts such as but not limited to shoot biomass, seed biomass, leaf biomass, etc. and/or
[0219] (harvestable) parts below ground, such as but not limited to root biomass, etc., and/or
[0220] vegetative biomass such as root biomass, shoot biomass, etc., and/or
[0221] reproductive organs, and/or
[0222] propagules such as seed.

[0223] Marker Assisted Breeding

[0224] Such breeding programmes sometimes require introduction of allelic variation by mutagenic treatment of the plants, using for example EMS mutagenesis; alternatively, the programme may start with a collection of allelic variants of so called “natural” origin caused unintentionally. Identification of allelic variants then takes place, for example, by PCR. This is followed by a step for selection of superior allelic variants of the sequence in question and which give increased yield. Selection is typically carried out by monitoring growth performance of plants containing different allelic variants of the sequence in question. Growth performance may be monitored in a greenhouse or in the field. Further optional steps include crossing plants in which the superior allelic variant was identified with another plant. This could be used, for example, to make a combination of interesting phenotypic features.

[0225] Use as Probes in (Gene Mapping)

[0226] Use of nucleic acids encoding the protein of interest for genetically and physically mapping the genes requires only a nucleic acid sequence of at least 15 nucleotides in length. These nucleic acids may be used as restriction fragment length polymorphism (RFLP) markers. Southern blots (Sambrook J, Fritsch E F and Maniatis T (1989) Molecular Cloning, A Laboratory Manual) of restriction-digested plant genomic DNA may be probed with the nucleic acids encoding the protein of interest. The resulting banding patterns may then be subjected to genetic analyses using computer programs such as MapMaker (Lander et al. (1987) Genomics 1: 174-181) in order to construct a genetic map. In addition, the nucleic acids may be used to probe Southern blots containing restriction endonuclease-treated genomic DNAs of a set of individuals representing parent and progeny of a defined genetic cross. Segregation of the DNA polymorphisms is noted and used to calculate the position of the nucleic acid encoding the protein of interest in the genetic map previously obtained using this population (Botstein et al. (1980) Am. J. Hum. Genet. 32:314-331).

[0227] The production and use of plant gene-derived probes for use in genetic mapping is described in Bernatzky and Tanksley (1986) Plant Mol. Biol. Reporter 4: 37-41. Numerous publications describe genetic mapping of specific cDNA clones using the methodology outlined above or variations thereof. For example, F2 intercross populations, backcross populations, randomly mated populations, near isogenic lines, and other sets of individuals may be used for mapping. Such methodologies are well known to those skilled in the art.

[0228] The nucleic acid probes may also be used for physical mapping (i.e., placement of sequences on physical maps; see Hoheisel et al. In: Non-mammalian Genomic Analysis: A Practical Guide, Academic press 1996, pp. 319-346, and references cited therein).

[0229] In another embodiment, the nucleic acid probes may be used in direct fluorescence in situ hybridisation (FISH) mapping (Trask (1991) Trends Genet. 7:149-154). Although current methods of FISH mapping favour use of large clones (several kb to several hundred kb; see Laan et al. (1995) Genome Res. 5:13-20), improvements in sensitivity may allow performance of FISH mapping using shorter probes.

[0230] A variety of nucleic acid amplification-based methods for genetic and physical mapping may be carried out using the nucleic acids. Examples include allele-specific amplification (Kazazian (1989) J. Lab. Clin. Med. 11:95-96), polymorphism of PCR-amplified fragments (CAPS; Sheffield et al. (1993) Genomics 16:325-332), allele-specific ligation (Landegren et al. (1988) Science 241:1077-1080), nucleotide extension reactions (Sokolov (1990) Nucleic Acid Res. 18:3671), Radiation Hybrid Mapping (Walter et al. (1997) Nat. Genet. 7:22-28) and Happy Mapping (Dear and Cook (1989) Nucleic Acid Res. 17:6795-6807). For these methods, the sequence of a nucleic acid is used to design and produce primer pairs for use in the amplification reaction or in primer extension reactions. The design of such primers is well known to those skilled in the art. In methods employing PCR-based genetic mapping, it may be necessary to identify DNA sequence differences between the parents of the mapping cross in the region corresponding to the instant nucleic acid sequence. This, however, is generally not necessary for mapping methods.

[0231] Plant

[0232] The term “plant” as used herein encompasses whole plants, ancestors and progeny of the plants and plant parts, including seeds, shoots, stems, leaves, roots (including tubers), flowers, and tissues and organs, wherein each of the aforementioned comprise the gene/nucleic acid of interest. The term “plant” also encompasses plant cells, suspension cultures, callus tissue, embryos, meristematic regions, gametophytes, sporophytes, pollen and microspores, again wherein each of the aforementioned comprises the gene/nucleic acid of interest.

[0233] Plants that are particularly useful in the methods of the invention include all plants which belong to the superfamily Viridiplantae, in particular monocotyledonous and dicotyledonous plants including fodder or forage legumes, ornamental plants, food crops, trees or shrubs selected from the list comprising Acer spp., Actinidia spp., Abelmoschus spp., Agave sisalana, Agropyron spp., Agrostis stolonifera, Allium spp., Amaranthus spp., Ammophila arenaria, Ananas comosus, Annona spp., Apium graveolens, Arachis spp, Artocarpus spp., Asparagus officinalis, Avena spp. (e.g. Avena sativa, Avena fatua, Avena byzantina, Avena fatua var. sativa, Avena hybrida), Averrhoa carambola, Bambusa sp., Benincasa hispida, Bertholletia excelsea, Beta vulgaris, Brassica spp. (e.g. Brassica napus, Brassica rapa ssp. [canola, oilseed rape, turnip rape]), Cadaba farinosa, Camellia sinensis, Canna indica, Cannabis sativa, Capsicum spp., Carex elata, Carica papaya, Carissa macrocarpa, Carya spp., Carthamus tinctorius, Castanea spp., Ceiba pentandra, Cichorium endivia, Cinnamomum spp., Citrullus lanatus, Citrus spp., Cocos spp., Coffea spp., Colocasia esculenta, Cola spp., Corchorus sp., Coriandrum sativum, Corylus spp., Crataegus spp., Crocus sativus, Cucurbita spp., Cucumis spp., Cynara spp., Daucus carota, Desmodium spp., Dimocarpus longan, Dioscorea spp., Diospyros spp., Echinochloa spp., Elaeis (e.g. Elaeis guineensis, Elaeis oleifera), Eleusine coracana, Eragrostis tef, Erianthus sp., Eriobotrya japonica, Eucalyptus sp., Eugenia uniflora, Fagopyrum spp., Fagus spp., Festuca arundinacea, Ficus carica, Fortunella spp., Fragaria spp., Ginkgo biloba, Glycine spp. (e.g. Glycine max, Soja hispida or Soja max), Gossypium hirsutum, Helianthus spp. (e.g. Helianthus annuus), Hemerocaffis fulva, Hibiscus spp., Hordeum spp. (e.g. Hordeum vulgare), Ipomoea batatas, Juglans spp., Lactuca sativa, Lathyrus spp., Lens culinaris, Linum usitatissimum, Litchi chinensis, Lotus spp., Luffa acutangula, Lupinus spp., Luzula sylvatica, Lycopersicon spp. (e.g. Lycopersicon esculentum, Lycopersicon lycopersicum, Lycopersicon pyriforme), Macrotyloma spp., Malus spp., Malpighia emarginata, Mammea americana, Mangifera indica, Manihot spp., Manilkara zapota, Medicago sativa, Melilotus spp., Mentha spp., Miscanthus sinensis, Momordica spp., Morus nigra, Musa spp., Nicotiana spp., Olea spp., Opuntia spp., Ornithopus spp., Oryza spp. (e.g. Oryza sativa, Oryza latifolia), Panicum miliaceum, Panicum virgatum, Passiflora edulis, Pastinaca sativa, Pennisetum sp., Persea spp., Petroselinum crispum, Phalaris arundinacea, Phaseolus spp., Phleum pratense, Phoenix spp., Phragmites australis, Physalis spp., Pinus spp., Pistacia vera, Pisum spp., Poa spp., Populus spp., Prosopis spp., Prunus spp., Psidium spp., Punica granatum, Pyrus communis, Quercus spp., Raphanus sativus, Rheum rhabarbarum, Ribes spp., Ricinus communis, Rubus spp., Saccharum spp., Salix sp., Sambucus spp., Secale cereale, Sesamum spp., Sinapis sp., Solanum spp. (e.g. Solanum tuberosum, Solanum integrifolium or Solanum lycopersicum), Sorghum bicolor, Spinacia spp., Syzygium spp., Tagetes spp., Tamarindus indica, Theobroma cacao, Trifolium spp., Tripsacum dactyloides, Triticosecale rimpaui, Triticum spp. (e.g. Triticum aestivum, Triticum durum, Triticum turgidum, Triticum hybernum, Triticum macha, Triticum sativum, Triticum monococcum or Triticum vulgare), Tropaeolum minus, Tropaeolum majus, Vaccinium spp., Vicia spp., Vigna spp., Viola odorata, Vitis spp., Zea mays, Zizania palustris, Ziziphus spp., amongst others.

[0234] Control Plant(s)

[0235] The choice of suitable control plants is a routine part of an experimental setup and may include corresponding wild type plants or corresponding plants without the gene of interest. The control plant is typically of the same plant species or even of the same variety as the plant to be assessed. The control plant may also be a nullizygote of the plant to be assessed. Nullizygotes are individuals missing the transgene by segregation. A “control plant” as used herein refers not only to whole plants, but also to plant parts, including seeds and seed parts.

### DETAILED DESCRIPTION OF THE INVENTION

[0236] LEJ1 Polypeptide—ExbB Plypeptide—NMPRT Polypeptide

[0237] Surprisingly, it has now been found that modulating expression in a plant of a nucleic acid encoding an LEJ1 polypeptide gives plants having enhanced yield-related traits relative to control plants. According to a first embodiment, the present invention provides a method for enhancing yield-related traits in plants relative to control plants, comprising modulating expression in a plant of a nucleic acid encoding an LEJ1 polypeptide and optionally selecting for plants having enhanced yield-related traits.

[0238] Furthermore, it has now surprisingly been found that modulating expression in a plant of a nucleic acid encoding an ExbB polypeptide gives plants having enhanced yield-related traits relative to control plants. According to a second embodiment, the present invention provides a method for enhancing yield-related traits in plants relative to control plants, comprising modulating expression in a plant of a nucleic acid encoding an ExbB polypeptide and optionally selecting for plants having enhanced yield-related traits.

[0239] Surprisingly, it has now been found that modulating expression in a plant of a nucleic acid encoding a NMPRT as defined herein gives plants having enhanced yield-related traits relative to control plants. According to a third embodiment, the present invention provides a method for enhancing yield-related traits in plants relative to control plants, comprising modulating expression in a plant of a nucleic acid encoding a NMPRT as defined herein.

[0240] In another embodiment, the invention provides a method for producing plants having enhanced yield-related traits relative to control plants, comprising the steps of
[0241] (i) modulating expression in a plant of a nucleic acid encoding a NMPRT polypeptide and
[0242] (ii) selecting for plants having enhanced yield-related traits.

[0243] A preferred method for modulating (preferably, increasing) expression of a nucleic acid encoding an LEJ1 polypeptide is by introducing and expressing in a plant a nucleic acid encoding an LEJ1 polypeptide. Likewise, a preferred method for modulating, preferably increasing, expression of a nucleic acid encoding an ExbB polypeptide is by introducing and expressing in a plant a nucleic acid encoding an ExbB polypeptide, and a preferred method for modulating, and preferably for increasing, expression in a plant of a nucleic acid encoding a NMPRT polypeptide as defined herein is by introducing and expressing in said plant said nucleic acid encoding said NMPRT.

[0244] It shall be noted that in the context of the present invention, the terms “nucleic acid sequence” and “nucleic acid” are used interchangeably. Also, the terms “amino acid sequence” and “amino acid” are used interchangeably in the context of the present invention.

[0245] In one embodiment any reference hereinafter to a “protein useful in the methods of the invention” is taken to mean an LEJ1 polypeptide as defined herein. Any reference hereinafter to a “nucleic acid useful in the methods of the invention” is taken to mean a nucleic acid capable of encoding such an LEJ1 polypeptide. The nucleic acid to be introduced into a plant (and therefore useful in performing the methods of the invention) is any nucleic acid encoding the type of protein which will now be described, hereafter also named “LEJ1 nucleic acid” or “LEJ1 gene”.

[0246] A “LEJ1 polypeptide” as defined herein refers to any polypeptide comprising a Cystathionine beta-synthase domain (Interpro entry IPR000644, PFAM entry PF00571), or at least one, preferably two CBS domain(s) (ProfileScan PS51371 or SMART SM00116). Preferably the LEJ1 polypeptide also comprises a localisation signal sequence for the chloroplast.

[0247] Further preferably, the LEJ1 polypeptide also comprises one or more of the following motifs:

Motif 1 (SEQ ID NO: 205):
HVVKP[TS]T[TS]VD[ED]ALE[ALI]LVE[HKN][KR][IV]TG[FL]PV[IV]DD[DN]W[KTN]LVG[VL]V
SDYDLLALDSISG
Motif 2 (SEQ ID NO: 206):
T[NS][ML]FP[ED]VDSTWKTFNE[VIL]QKL[LI]SKT[NY]GKV[VI]GD[LV]MTP[AS]PLVVR
Motif 3 (SEQ ID NO: 207):
NLEDAARLLLETK[YF]RRLPVVD[SA][DE]GKL[VI]GI[IL]TRGNV
Motif 4 (SEQ ID NO: 208):
P[AG][KR]N[GE]GYTVGDFMT[GP][RK]Q[HN]LHVVKPSTSVDDALELLVEKKVTGLPVIDD
[DN]W
Motif 5 (SEQ ID NO: 209):
[GR][RS]SQN[DE]TN[LM]FP[ND]VDS[TS]WKTFNELQKLISKT[HY]G[KQ]VVGDLMTPSPLV
VR[GD]ST
Motif 6 (SEQ ID NO: 210):
NLEDAARLLLETKFRRLPVVD[SA]DGKLIGILTRGNVVRAALQIKRETE[NK]S[TA]

[0248] The term “LEJ1” or “LEJ1 polypeptide” as used herein also intends to include homologues as defined hereunder of “LEJ1 polypeptide”.

[0249] Motifs 1 to 6 were derived using the MEME algorithm (Bailey and Elkan, Proceedings of the Second International Conference on Intelligent Systems for Molecular Biology, pp. 28-36, AAAI Press, Menlo Park, Calif., 1994). At each position within a MEME motif, the residues are shown that are present in the query set of sequences with a frequency higher than 0.2. Residues within square brackets represent alternatives.

[0250] More preferably, the LEJ1 polypeptide comprises in increasing order of preference, at least 2, at least 3, at least 4, at least 5, or all 6 motifs.

[0251] Additionally or alternatively, the homologue of an LEJ1 protein has in increasing order of preference at least 25%, 26%, 27%, 28%, 29%, 30%, 31%, 32%, 33%, 34%, 35%, 36%, 37%, 38%, 39%, 40%, 41%, 42%, 43%, 44%, 45%, 46%, 47%, 48%, 49%, 50%, 51%, 52%, 53%, 54%, 55%, 56%, 57%, 58%, 59%, 60%, 61%, 62%, 63%, 64%, 65%, 66%, 67%, 68%, 69%, 70%, 71%, 72%, 73%, 74%, 75%, 76%, 77%, 78%, 79%, 80%, 81%, 82%, 83%, 84%, 85%, 86%, 87%, 88%, 89%, 90%, 91%, 92%, 93%, 94%, 95%, 96%, 97%, 98%, or 99% overall sequence identity to the amino acid represented by SEQ ID NO: 2, provided that the homologous protein comprises any one or more of the conserved motifs as outlined above. The overall sequence identity is determined using a global alignment algorithm, such as the Needleman Wunsch algorithm in the program GAP (GCG Wisconsin Package, Accelrys), preferably with default parameters and preferably with sequences of mature proteins (i.e. without taking into account secretion signals or transit peptides). Compared to overall sequence identity, the sequence identity will generally be higher when only conserved domains or motifs are considered. Preferably the motifs in an LEJ1 polypeptide have, in increasing order of preference, at least 70%, 71%, 72%, 73%, 74%, 75%, 76%, 77%, 78%, 79%, 80%, 81%, 82%, 83%, 84%, 85%, 86%, 87%, 88%, 89%, 90%, 91%, 92%, 93%, 94%, 95%, 96%, 97%, 98%, or 99% sequence identity to any one or more of the motifs represented by SEQ ID NO: 205 to SEQ ID NO: 210 (Motifs 1 to 6).

[0252] In another embodiment, any reference hereinafter to a “protein useful in the methods of the invention” is taken to mean an ExbB polypeptide as defined herein. Any reference hereinafter to a “nucleic acid useful in the methods of the invention” is taken to mean a nucleic acid capable of encoding such an ExbB polypeptide. The nucleic acid to be introduced into a plant and therefore useful in performing the methods of the invention, is any nucleic acid encoding the type of protein which will now be described, hereafter also named “ExbB nucleic acid” or “ExbB gene”.

[0253] An “ExbB polypeptide” as defined herein refers to any polypeptide comprising an InterPro accession IPR002898MotA/TolQ/ExbB proton channel domain, corresponding to PFAM accession number PF01618 and which is of non-vertebrate origin. The term “non-vertebrate” origin as used herein intends to refer to any origin different from vertebrates, and for instance includes but is not limited to algal, bacterial, fungal, yeast or plant origin.

[0254] In a preferred embodiment, the ExbB polypeptide comprises one or more transmembrane domain.

[0255] A skilled person is well aware of algorithms to determine transmembrane domains. An example of such and algorithm is TMHMM, hosted on the server of the Technical University of Denmark.

[0256] In a preferred embodiment, an “ExbB” or “ExbB polypeptide” as used herein refers to any ExbB polypeptide of prokaryotic origin.

[0257] Additionally or alternatively, the homologue of an ExbB protein has in increasing order of preference at least 18%, 19%, 20%, 21%, 22%, 23%, 24%, 25%, 26%, 27%, 28%, 29%, 30%, 31%, 32%, 33%, 34%, 35%, 36%, 37%, 38%, 39%, 40%, 41%, 42%, 43%, 44%, 45%, 46%, 47%, 48%, 49%, 50%, 51%, 52%, 53%, 54%, 55%, 56%, 57%, 58%, 59%, 60%, 61%, 62%, 63%, 64%, 65%, 66%, 67%, 68%, 69%, 70%, 71%, 72%, 73%, 74%, 75%, 76%, 77%, 78%, 79%, 80%, 81%, 82%, 83%, 84%, 85%, 86%, 87%, 88%, 89%, 90%, 91%, 92%, 93%, 94%, 95%, 96%, 97%, 98%, or 99% overall sequence identity to the amino acid represented by SEQ ID NO: 212, provided that the homologous protein comprises one or more transmembrane domain as outlined above. The overall sequence identity is determined using a global alignment algorithm, such as the Needleman Wunsch algorithm in the program GAP (GCG Wisconsin Package, Accelrys), preferably with default parameters and preferably with sequences of mature proteins (i.e. without taking into account secretion signals or transit peptides). Compared to overall sequence identity, the sequence identity will generally be higher when only conserved domains or motifs are considered.

[0258] In another embodiment, any reference hereinafter to a “protein useful in the methods of the invention” is taken to mean a NMPRT as defined herein. An “NMPRT” as used herein is also known under the name “nadV polypeptide”. According to this embodiment, any reference hereinafter to a “nucleic acid useful in the methods of the invention” is taken to mean a nucleic acid capable of encoding a NMPRT as defined herein. The nucleic acid to be introduced into a plant, and therefore useful in performing the methods of the invention, is any nucleic acid encoding the type of protein which will now be described, hereafter. This nucleic acid is also named herein as “NMPRT nucleic acid” or “NMPRT gene”.

[0259] A “NMPRT” or “NMPRT polypeptide” or “NMPRT protein” as used herein refers to any polypeptide having nicotinamide phosphoribosyltransferase activity and which preferably is of non-vertebrate origin. The term “non-vertebrate” origin as used herein intends to refer to any origin different from vertebrates, and for instance includes but is not limited to algal, bacterial, fungal, yeast or plant origin. In a preferred embodiment, a “NMPRT” or “NMPRT polypeptide” as used herein refers to any polypeptide of prokaryotic origin, and preferably of cyanobacterial origin.

[0260] In another preferred embodiment, a “NMPRT” or “NMPRT polypeptide” as used herein refers to any polypeptide as provided above which further comprises:
[0261] (i) a domain with an InterPro accession IPR016471, and
[0262] (ii) at least 50% amino acid sequence identity to a domain as represented by SEQ ID NO: 315.

[0263] In another preferred embodiment a NMPRT comprises at least 64%, and for instance at least 65%, 66%, 67%, 68%, 69%, 70%, 71%, 72%, 73%, 74%, 75%, 76%, 77%, 78%, 79%, 80%, 81%, 82%, 83%, 84%, 85%, 86%, 87%, 88%, 89%, 90%, 91%, 92%, 93%, 94%, 95%, 96%, 97%, 98%, 99%, or more amino acid sequence identity to one or more of the following motifs:

(i) Motif 7:
(SEQ ID NO: 318)
FKLHDFGARGVSSGESSGIGGLAHLVNFQGSDTV,
(ii) Motif 8:
(SEQ ID NO: 319)
AAYSIPAAEHSTITAWG,
(iii) Motif 9:
(SEQ ID NO: 320)
AVVSDSYDL.
(iv) Motif 10:
(SEQ ID NO: 321)
VIRPDSGDP,
(v) Motif 11:
(SEQ ID NO: 322)
VRVIQGDGV,
(vi) Motif 12:
(SEQ ID NO: 323)
NLAFGMGGALLQKVNRDT.

[0264] In other words, a method is provided for enhancing yield-related traits in plants relative to control plants, comprising modulating expression in a plant of a nucleic acid encoding a nicotinamide phosphoribosyltransferase (NMPRT) as given herein, wherein said NMPRT comprises one or more of the following motifs:
[0265] (i) Motif 7: FKLHDFGARGVSSGESSGIGGLAHLVNFQGSDTV (SEQ ID NO: 318), wherein with decreasing order of preference at most 1, 2, 3, 4, 5, 6, 7, 8, 9, or 10 amino acid mismatches or changes are allowed
[0266] (ii) Motif 8: AAYSIPAAEHSTITAWG (SEQ ID NO: 319), wherein with decreasing order of preference at most 1, 2, 3, 4, or 5 amino acid mismatches or changes are allowed;
[0267] (iii) Motif 9: AVVSDSYDL (SEQ ID NO: 320), wherein with decreasing order of preference at most 1, 2, or 3 amino acid mismatches or changes are allowed;
[0268] (iv) Motif 10: VIRPDSGDP (SEQ ID NO: 321), wherein with decreasing order of preference at most 1, 2, or 3 amino acid mismatches or changes are allowed;
[0269] (v) Motif 11: VRVIQGDGV (SEQ ID NO: 322), wherein with decreasing order of preference at most 1, 2, or 3 amino acid mismatches or changes are allowed; and
[0270] (vi) Motif 12: NLAFGMGGALLQKVNRDT (SEQ ID NO: 323) wherein with decreasing order of preference at most 1, 2, 3, 4, or 5 amino acid mismatches or changes are allowed.

[0271] More preferably, the NMPRT polypeptide comprises in increasing order of preference, at least 2, at least 3, at least 4, at least 5, or all 6 motifs as described above. The terms “domain” and “motif” are defined in the “definitions” section herein.

[0272] The term “NMPRT” or “NMPRT polypeptide” as used herein also intends to include homologues as defined hereunder of a “NMPRT”.

[0273] Additionally or alternatively, a homologue of a NMPRT protein has in increasing order of preference at least 20%, 21%, 22%, 23%, 24%, 25%, 26%, 27%, 28%, 29%, 30%, 31%, 32%, 33%, 34%, 35%, 36%, 37%, 38%, 39%, 40%, 41%, 42%, 43%, 44%, 45%, 46%, 47%, 48%, 49%, 50%, 51%, 52%, 53%, 54%, 55%, 56%, 57%, 58%, 59%, 60%, 61%, 62%, 63%, 64%, 65%, 66%, 67%, 68%, 69%, 70%, 71%, 72%, 73%, 74%, 75%, 76%, 77%, 78%, 79%, 80%, 81%, 82%, 83%, 84%, 85%, 86%, 87%, 88%, 89%, 90%, 91%, 92%, 93%, 94%, 95%, 96%, 97%, 98%, or 99% overall sequence identity to the amino acid represented by SEQ ID NO: 282, provided that the homologous protein comprises a domain as represented by SEQ ID NO: 315 and/or any one or more of the motifs 7 to 12 as outlined above. The overall sequence identity is determined using a global alignment algorithm, such as the Needleman Wunsch algorithm in the program GAP (GCG Wisconsin Package, Accelrys), preferably with default parameters and preferably with sequences of mature proteins (i.e. without taking into account secretion signals or transit peptides). Compared to overall sequence identity, the sequence identity will generally be higher when only conserved domains or motifs are considered. Preferably the motifs in a NMPRT polypeptide have, in increasing order of preference, at least 70%, 71%, 72%, 73%, 74%, 75%, 76%, 77%, 78%, 79%, 80%, 81%, 82%, 83%, 84%, 85%, 86%, 87%, 88%, 89%, 90%, 91%, 92%, 93%, 94%, 95%, 96%, 97%, 98%, or 99% sequence identity to a domain as represented by SEQ ID NO: 315 and/or to any one or more of the motifs represented by SEQ ID NO: 318 to SEQ ID NO: 323 (Motifs 7 to 12).

[0274] In another embodiment, the invention relates to methods wherein a NMPRT polypeptide comprises a conserved domain (or motif) with at least 70%, 71%, 72%, 73%, 74%, 75%, 76%, 77%, 78%, 79%, 80%, 81%, 82%, 83%, 84%, 85%, 86%, 87%, 88%, 89%, 90%, 91%, 92%, 93%, 94%, 95%, 96%, 97%, 98%, or 99% sequence identity to a conserved domain of amino acid coordinates 1 to 461 of SEQ ID NO: 282. In another embodiment, the invention relates to methods wherein a NMPRT polypeptide comprises a conserved domain (or motif) with at least 70%, 71%, 72%, 73%, 74%, 75%, 76%, 77%, 78%, 79%, 80%, 81%, 82%, 83%, 84%, 85%, 86%, 87%, 88%, 89%, 90%, 91%, 92%, 93%, 94%, 95%, 96%, 97%, 98%, or 99% sequence identity to a conserved domain of amino acid coordinates 64 to 459 of SEQ ID NO: 282.

[0275] The terms “domain”, “signature” and “motif” are defined in the “definitions” section herein.

[0276] Preferably, the LEJ1 polypeptide sequence which when used in the construction of a phylogenetic tree, such as the one depicted in FIG. 3, clusters with the group of LEJ1 polypeptides comprising the amino acid sequence represented by SEQ ID NO: 2 (At4g34120, boxed) rather than with any other group.

[0277] Preferably, the ExbB polypeptide sequence which when used in the construction of a phylogenetic tree, such as the one depicted in FIG. 9, clusters with the group of ExbB polypeptides comprising the amino acid sequence represented by SEQ ID NO: 212 rather than with any other group.

[0278] Furthermore, ExbB polypeptides (at least in their native form) are localised to membranes as described above.

[0279] Preferably, the NMPRT polypeptide sequence which when used in the construction of a phylogenetic tree, such as the one depicted in Gazzaniga et al. 2009, clusters with the group of NMPRT polypeptides of cyanobacteria comprising the amino acid sequence represented by SEQ ID NO: 282 rather than with any other group.

[0280] In another preferred embodiment, a “NMPRT” or “NMPRT polypeptide” or “NMPRT protein” as used herein refers to a “nicotinamide phosphoribosyltransferase” also named NMPRT, NMPRTase or NAmPRTase, (International nomenclature: E.G. 2.4.2.12), which is a key enzyme in nicotinamide adenyl dinucleotide (NAD) biosynthesis from the natural precursor nicotinamide. NMPRT polypeptides (at least in their native form) typically have enzymatic activity. Tools and techniques for measuring their nicotinamide phosphoribosyltransferase activity are well known in the art. NMPRT enzyme activity can for instance be measured as indicated in example 6.

[0281] In addition, LEJ1 polypeptides, when expressed in rice according to the methods of the present invention as outlined in Examples 7 and 8, give plants having increased yield related traits, in particular increased fill rate and increased harvest index.

[0282] In addition, ExbB polypeptides, when expressed in rice according to the methods of the present invention as outlined in the example section herein, give plants having increased yield related traits, in particular an increase in any one of more of seed yield, thousand kernel weight, harvest index, number of filled seeds, total weight of the seeds; even more in particular a significant increase in the number of filled seeds.

[0283] In addition, NMPRT polypeptides, when expressed in rice according to methods of the present invention as outlined in Examples 7 and 8, give plants having increased yield related traits, including increasing root/shoot index, total seed yield, fill rate, number of flowers per panicle, number of filed seeds, thousand kernel weight.

[0284] In a preferred embodiment, the invention provides a method for enhancing yield-related traits in plants relative to control plants, comprising modulating expression in a plant of a nucleic acid encoding a nicotinamide phosphoribosyltransferase (NMPRT) from Synechocystis sp. strain PCC 6803, and in particular wherein said nucleic acid is the slr0788 gene of Synechocystis sp. strain PCC 6803 represented by SEQ ID NO: 281.

[0285] In another embodiment, the invention provides a method for enhancing yield-related traits in plants relative to control plants, comprising modulating expression in a plant of a nucleic acid encoding a nicotinamide phosphoribosyltransferase (NMPRT) from Synechococcus elongatus strain PCC 7942, and in particular wherein said nucleic acid is the gene named 2328 of Synechococcus elongates 7942 represented by SEQ ID NO: 309.

[0286] Concerning LEJ1 polypeptides, the present invention is illustrated by transforming plants with the nucleic acid sequence represented by SEQ ID NO: 1, encoding the polypeptide sequence of SEQ ID NO: 2. However, performance of the invention is not restricted to these sequences; the methods of the invention may advantageously be performed using any LEJ1-encoding nucleic acid or LEJ1 polypeptide as defined herein.

[0287] Examples of nucleic acids encoding LEJ1 polypeptides are given in Table A1 of the Examples section herein. Such nucleic acids are useful in performing the methods of the invention. The amino acid sequences given in Table A1 of the Examples section are example sequences of orthologues and paralogues of the LEJ1 polypeptide represented by SEQ ID NO: 2, the terms “orthologues” and “paralogues” being as defined herein. Further orthologues and paralogues may readily be identified by performing a so-called reciprocal blast search as described in the definitions section; where the query sequence is SEQ ID NO: 1 or SEQ ID NO: 2, the second BLAST (back-BLAST) would be against Arabidopsis thaliana sequences.

[0288] Concerning ExbB polypeptides, the present invention is illustrated by transforming plants with the nucleic acid sequence represented by SEQ ID NO: 211, encoding the polypeptide sequence of SEQ ID NO: 212. However, performance of the invention is not restricted to these sequences; the methods of the invention may advantageously be performed using any ExbB-encoding nucleic acid or ExbB polypeptide as defined herein.

[0289] Examples of nucleic acids encoding ExbB polypeptides are given in Table A2 of the Examples section herein. Such nucleic acids are useful in performing the methods of the invention. The amino acid sequences given in Table A2 of the Examples section are example sequences of orthologues and paralogues of the ExbB polypeptide represented by SEQ ID NO: 212, the terms “orthologues” and “paralogues” being as defined herein. Further orthologues and paralogues may readily be identified by performing a so-called reciprocal blast search as described in the definitions section; where the query sequence is SEQ ID NO: 211 or SEQ ID NO: 212, the second BLAST (back-BLAST) would be against Synechocystis sequences.

[0290] Concerning NMPRT polypeptides, the present invention is illustrated by transforming plants with the nucleic acid sequence represented by SEQ ID NO: 281, encoding the polypeptide sequence of SEQ ID NO: 282. However, performance of the invention is not restricted to these sequences; the methods of the invention may advantageously be performed using any NMPRT-encoding nucleic acid or NMPRT polypeptide as defined herein.

[0291] Examples of nucleic acids encoding NMPRT polypeptides are given in Table A3 of the Examples section herein. Such nucleic acids are useful in performing the methods of the invention. The amino acid sequences given in Table A3 of the Examples section are example sequences of orthologues and paralogues of the NMPRT polypeptide represented by SEQ ID NO: 282, the terms “orthologues” and “paralogues” being as defined herein. Further orthologues and paralogues may readily be identified by performing a so-called reciprocal blast search as described in the definitions section; where the query sequence is SEQ ID NO: 281 or SEQ ID NO: 282, the second BLAST (back-BLAST) would be against Synechocystis sequences.

[0292] Nucleic acid variants may also be useful in practising the methods of the invention. Examples of such variants include nucleic acids encoding homologues and derivatives of any one of the amino acid sequences given in Table A1, or Table A2, or Table A3 of the Examples section, the terms “homologue” and “derivative” being as defined herein. Also useful in the methods of the invention are nucleic acids encoding homologues and derivatives of orthologues or paralogues of any one of the amino acid sequences given in Table A1, or Table A2, or Table A3 of the Examples section. Homologues and derivatives useful in the methods of the present invention have substantially the same biological and functional activity as the unmodified protein from which they are derived. Further variants useful in practising the methods of the invention are variants in which codon usage is optimised or in which miRNA target sites are removed.

[0293] Further nucleic acid variants useful in practising the methods of the invention include portions of nucleic acids encoding LEJ1 polypeptides, or ExbB polypeptides, or NMPRT polypeptides, nucleic acids hybridising to nucleic acids encoding LEJ1 polypeptides, or ExbB polypeptides, or NMPRT polypeptides, splice variants of nucleic acids encoding LEJ1 polypeptides, allelic variants of nucleic acids encoding LEJ1 polypeptides, or ExbB polypeptides, or NMPRT polypeptides, and variants of nucleic acids encoding LEJ1 polypeptides, or ExbB polypeptides, or NMPRT polypeptides, obtained by gene shuffling. The terms hybridising sequence, splice variant, allelic variant and gene shuffling are as described herein.

[0294] Nucleic acids encoding LEJ1 polypeptides, or ExbB polypeptides, or NMPRT polypeptides, need not be full-length nucleic acids, since performance of the methods of the invention does not rely on the use of full-length nucleic acid sequences. According to the present invention, there is provided a method for enhancing yield-related traits in plants, comprising introducing and expressing in a plant a portion of any one of the nucleic acid sequences given in Table A1, or Table A2, or Table A3 of the Examples section, or a portion of a nucleic acid encoding an orthologue, paralogue or homologue of any of the amino acid sequences given in Table A1, or Table A2, or Table A3 of the Examples section.

[0295] A portion of a nucleic acid may be prepared, for example, by making one or more deletions to the nucleic acid. The portions may be used in isolated form or they may be fused to other coding (or non-coding) sequences in order to, for example, produce a protein that combines several activities. When fused to other coding sequences, the resultant polypeptide produced upon translation may be bigger than that predicted for the protein portion.

[0296] Concerning LEJ1 polypeptides, portions useful in the methods of the invention, encode an LEJ1 polypeptide as defined herein, and have substantially the same biological activity as the amino acid sequences given in Table A1 of the Examples section. Preferably, the portion is a portion of any one of the nucleic acids given in Table A1 of the Examples section, or is a portion of a nucleic acid encoding an orthologue or paralogue of any one of the amino acid sequences given in Table A1 of the Examples section. Preferably the portion is at least 300, 350, 400, 450, 500, 550, 600, 650, 700, 750, 800, 850 consecutive nucleotides in length, the consecutive nucleotides being of any one of the nucleic acid sequences given in Table A1 of the Examples section, or of a nucleic acid encoding an orthologue or paralogue of any one of the amino acid sequences given in Table A1 of the Examples section. Most preferably the portion is a portion of the nucleic acid of SEQ ID NO: 1. Preferably, the portion encodes a fragment of an amino acid sequence which, when used in the construction of a phylogenetic tree, such as the one depicted in FIG. 3, clusters with the group of LEJ1 polypeptides comprising the amino acid sequence represented by SEQ ID NO: 2 (At4g34120, boxed) rather than with any other group and/or comprises one or more of motifs 1 to 6 and/or has at least 37% sequence identity to SEQ ID NO: 2.

[0297] Concerning ExbB polypeptides, portions useful in the methods of the invention, encode an ExbB polypeptide as defined herein, and have substantially the same biological activity as the amino acid sequences given in Table A2 of the Examples section. Preferably, the portion is a portion of any one of the nucleic acids given in Table A2 of the Examples section, or is a portion of a nucleic acid encoding an orthologue or paralogue of any one of the amino acid sequences given in Table A2 of the Examples section. Preferably the portion is at least 150, 200, 250, 300, 350, 500, 550, 600, 650, 700, 750, 800, 850, 900 consecutive nucleotides in length, the consecutive nucleotides being of any one of the nucleic acid sequences given in Table A2 of the Examples section, or of a nucleic acid encoding an orthologue or paralogue of any one of the amino acid sequences given in Table A2 of the Examples section. Most preferably the portion is a portion of the nucleic acid of SEQ ID NO: 211. Preferably, the portion encodes a fragment of an amino acid sequence which, when used in the construction of a phylogenetic tree, clusters with the group of ExbB polypeptides of bacterial origin, preferably comprising the amino acid sequence represented by SEQ ID NO: 212, rather than with any other group.

[0298] Concerning NMPRT polypeptides, portions useful in the methods of the invention, encode a NMPRT polypeptide as defined herein, and have substantially the same biological activity as the amino acid sequences given in Table A3 of the Examples section. Preferably, the portion is a portion of any one of the nucleic acids given in Table A3 of the Examples section, or is a portion of a nucleic acid encoding an orthologue or paralogue of any one of the amino acid sequences given in Table A3 of the Examples section. Preferably the portion is at least 1300, 1400, 1500, 1600, 1700, 1800, 1900, 2000, 2100, 2200, 2300, 2400, 2500, 2600 consecutive nucleotides in length, the consecutive nucleotides being of any one of the nucleic acid sequences given in Table A3 of the Examples section, or of a nucleic acid encoding an orthologue or paralogue of any one of the amino acid sequences given in Table A3 of the Examples section. Most preferably the portion is a portion of the nucleic acid of SEQ ID NO: 281. Preferably, the portion encodes a fragment of an amino acid sequence which, when used in the construction of a phylogenetic tree, clusters with the group of NMPRT polypeptides of bacterial origin, preferably comprising the amino acid sequence represented by SEQ ID NO: 281, rather than with any other group.

[0299] Another nucleic acid variant useful in the methods of the invention is a nucleic acid capable of hybridising, under reduced stringency conditions, preferably under stringent conditions, with a nucleic acid encoding an LEJ1 polypeptide, or an ExbB polypeptides, or an NMPRT polypeptide, as defined herein, or with a portion as defined herein.

[0300] According to the present invention, there is provided a method for enhancing yield-related traits in plants, comprising introducing and expressing in a plant a nucleic acid capable of hybridizing to any one of the nucleic acids given in Table A1, or Table A2, or Table A3 of the Examples section, or comprising introducing and expressing in a plant a nucleic acid capable of hybridising to a nucleic acid encoding an orthologue, paralogue or homologue of any of the nucleic acid sequences given in Table A1, or Table A2, or Table A3 of the Examples section.

[0301] Concerning LEJ1 polypeptides, hybridising sequences useful in the methods of the invention encode an LEJ1 polypeptide as defined herein, having substantially the same biological activity as the amino acid sequences given in Table A1 of the Examples section. Preferably, the hybridising sequence is capable of hybridising to the complement of any one of the nucleic acids given in Table A1 of the Examples section, or to a portion of any of these sequences, a portion being as defined above, or the hybridising sequence is capable of hybridising to the complement of a nucleic acid encoding an orthologue or paralogue of any one of the amino acid sequences given in Table A1 of the Examples section. Most preferably, the hybridising sequence is capable of hybridising to the complement of a nucleic acid as represented by SEQ ID NO: 1 or to a portion thereof.

[0302] Preferably, the hybridising sequence encodes a polypeptide with an amino acid sequence which, when full-length and used in the construction of a phylogenetic tree, such as the one depicted in FIG. 3, clusters with the group of LEJ1 polypeptides comprising the amino acid sequence represented by SEQ ID NO: 2 (At4g34120, boxed) rather than with any other group and/or comprises one or more of motifs 1 to 6 and/or has at least 37% sequence identity to SEQ ID NO: 2.

[0303] Concerning ExbB polypeptides, hybridising sequences useful in the methods of the invention encode an ExbB polypeptide as defined herein, having substantially the same biological activity as the amino acid sequences given in Table A2 of the Examples section. Preferably, the hybridising sequence is capable of hybridising to the complement of any one of the nucleic acids given in Table A2 of the Examples section, or to a portion of any of these sequences, a portion being as defined above, or the hybridising sequence is capable of hybridising to the complement of a nucleic acid encoding an orthologue or paralogue of any one of the amino acid sequences given in Table A2 of the Examples section. Most preferably, the hybridising sequence is capable of hybridising to the complement of a nucleic acid as represented by SEQ ID NO: 211 or to a portion thereof.

[0304] Preferably, the hybridising sequence encodes a polypeptide with an amino acid sequence which, when full-length and used in the construction of a phylogenetic tree clusters with the group of ExbB polypeptides of bacterial origin, preferably comprising the amino acid sequence represented by SEQ ID NO: 212, rather than with any other group group.

[0305] Concerning NMPRT polypeptides, hybridising sequences useful in the methods of the invention encode a NMPRT polypeptide as defined herein, having substantially the same biological activity as the amino acid sequences given in Table A3 of the Examples section. Preferably, the hybridising sequence is capable of hybridising to the complement of any one of the nucleic acids given in Table A3 of the Examples section, or to a portion of any of these sequences, a portion being as defined above, or the hybridising sequence is capable of hybridising to the complement of a nucleic acid encoding an orthologue or paralogue of any one of the amino acid sequences given in Table A3 of the Examples section. Most preferably, the hybridising sequence is capable of hybridising to the complement of a nucleic acid as represented by SEQ ID NO: 281 or to a portion thereof.

[0306] Preferably, the hybridising sequence encodes a polypeptide with an amino acid sequence which, when full-length and used in the construction of a phylogenetic tree, such as the one depicted in Gazzaniga et al. 2009, clusters with the group of NMPRT polypeptides of cyanobacterial origin, i.e. of the cynanobacteria, comprising the amino acid sequence represented by SEQ ID NO: 282 rather than with any other group, and more preferably with the NMPRT polypeptides from Synechocystis sp.

[0307] Another nucleic acid variant useful in the methods of the invention is a splice variant encoding an LEJ1 polypeptide as defined hereinabove, a splice variant being as defined herein.

[0308] According to the present invention, there is provided a method for enhancing yield-related traits in plants, comprising introducing and expressing in a plant a splice variant of any one of the nucleic acid sequences given in Table A1 of the Examples section, or a splice variant of a nucleic acid encoding an orthologue, paralogue or homologue of any of the amino acid sequences given in Table A1 of the Examples section.

[0309] Preferred splice variants are splice variants of a nucleic acid represented by SEQ ID NO: 1, or a splice variant of a nucleic acid encoding an orthologue or paralogue of SEQ ID NO: 2. Preferably, the amino acid sequence encoded by the splice variant, when used in the construction of a phylogenetic tree, such as the one depicted in FIG. 3, clusters with the group of LEJ1 polypeptides comprising the amino acid sequence represented by SEQ ID NO: 2 (At4g34120, boxed) rather than with any other group and/or comprises one or more of motifs 1 to 6 and/or has at least 37% sequence identity to SEQ ID NO: 2.

[0310] Another nucleic acid variant useful in performing the methods of the invention is an allelic variant of a nucleic acid encoding an LEJ1 polypeptide, or an ExbB polypeptide, or an NMPRT polypeptide, as defined hereinabove, an allelic variant being as defined herein.

[0311] According to the present invention, there is provided a method for enhancing yield-related traits in plants, comprising introducing and expressing in a plant an allelic variant of any one of the nucleic acids given in Table A1, or Table A2, or Table A3 of the Examples section, or comprising introducing and expressing in a plant an allelic variant of a nucleic acid encoding an orthologue, paralogue or homologue of any of the amino acid sequences given in Table A1, or Table A2, or Table A3 of the Examples section.

[0312] Concerning LEJ1 polypeptides, the polypeptides encoded by allelic variants useful in the methods of the present invention have substantially the same biological activity as the LEJ1 polypeptide of SEQ ID NO: 2 and any of the amino acids depicted in Table A1 of the Examples section. Allelic variants exist in nature, and encompassed within the methods of the present invention is the use of these natural alleles. Preferably, the allelic variant is an allelic variant of SEQ ID NO: 1 or an allelic variant of a nucleic acid encoding an orthologue or paralogue of SEQ ID NO: 2. Preferably, the amino acid sequence encoded by the allelic variant, when used in the construction of a phylogenetic tree, such as the one depicted in FIG. 3, clusters with the group of LEJ1 polypeptides comprising the amino acid sequence represented by SEQ ID NO: 2 (At4g34120, boxed) rather than with any other group and/or comprises one or more of motifs 1 to 6 and/or has at least 37% sequence identity to SEQ ID NO: 2.

[0313] Concerning ExbB polypeptides, the polypeptides encoded by allelic variants useful in the methods of the present invention have substantially the same biological activity as the ExbB polypeptide of SEQ ID NO: 212 and any of the amino acids depicted in Table A2 of the Examples section. Allelic variants exist in nature, and encompassed within the methods of the present invention is the use of these natural alleles. Preferably, the allelic variant is an allelic variant of SEQ ID NO: 211 or an allelic variant of a nucleic acid encoding an orthologue or paralogue of SEQ ID NO: 212. Preferably, the amino acid sequence encoded by the allelic variant clusters with the ExbB polypeptides of bacterial origin, preferably comprising the amino acid sequence represented by SEQ ID NO: 212, rather than with any other group.

[0314] Concerning NMPRT polypeptides, the polypeptides encoded by allelic variants useful in the methods of the present invention have substantially the same biological activity as the NMPRT polypeptide of SEQ ID NO: 282 and any of the amino acids depicted in Table A3 of the Examples section. Allelic variants exist in nature, and encompassed within the methods of the present invention is the use of these natural alleles. Preferably, the allelic variant is an allelic variant of SEQ ID NO: 281 or an allelic variant of a nucleic acid encoding an orthologue or paralogue of SEQ ID NO: 282. Preferably, the amino acid sequence encoded by the allelic variant, when used in the construction of a phylogenetic tree, such as the one depicted in Gazzaniga et al. 2009, clusters with the group of NMPRT polypeptides of cyanobacterial origin, i.e. of the cynanobacteria, comprising the amino acid sequence represented by SEQ ID NO: 282 rather than with any other group, and more preferably with the NMPRT polypeptides from Synechocystis sp.

[0315] Gene shuffling or directed evolution may also be used to generate variants of nucleic acids encoding LEJ1 polypeptides, or ExbB polypeptides, or NMPRT polypeptides, as defined above; the term “gene shuffling” being as defined herein.

[0316] According to the present invention, there is provided a method for enhancing yield-related traits in plants, comprising introducing and expressing in a plant a variant of any one of the nucleic acid sequences given in Table A1, or Table A2, or Table A3 of the Examples section, or comprising introducing and expressing in a plant a variant of a nucleic acid encoding an orthologue, paralogue or homologue of any of the amino acid sequences given in Table A1, or Table A2, or Table A3 of the Examples section, which variant nucleic acid is obtained by gene shuffling.

[0317] Concerning LEJ1 polypeptides, preferably, the amino acid sequence encoded by the variant nucleic acid obtained by gene shuffling, when used in the construction of a phylogenetic tree such as the one depicted in FIG. 3, clusters with the group of LEJ1 polypeptides comprising the amino acid sequence represented by SEQ ID NO: 2 (At4g34120, boxed) rather than with any other group and/or comprises one or more of motifs 1 to 6 and/or has at least 37% sequence identity to SEQ ID NO: 2.

[0318] Concerning ExbB polypeptides, preferably, the amino acid sequence encoded by the variant nucleic acid obtained by gene shuffling, when used in the construction of a phylogenetic tree clusters with the group of ExbB polypeptides of bacterial origin, preferably comprising the amino acid sequence represented by SEQ ID NO: 212, rather than with any other group.

[0319] Concerning NMPRT polypeptides, preferably, the amino acid sequence encoded by the variant nucleic acid obtained by gene shuffling, when used in the construction of a phylogenetic tree such as the one depicted in Gazzaniga et al. 2009, clusters with the group of NMPRT polypeptides of cyanobacterial origin, i.e. of the cynanobacteria, comprising the amino acid sequence represented by SEQ ID NO: 282 rather than with any other group, and more preferably with the NMPRT polypeptides from Synechocystis sp.

[0320] Furthermore, nucleic acid variants may also be obtained by site-directed mutagenesis. Several methods are available to achieve site-directed mutagenesis, the most common being PCR based methods (Current Protocols in Molecular Biology. Wiley Eds.).

[0321] Nucleic acids encoding LEJ1 polypeptides may be derived from any natural or artificial source. The nucleic acid may be modified from its native form in composition and/or genomic environment through deliberate human manipulation. Preferably the LEJ1 polypeptide-encoding nucleic acid is from a plant, further preferably from a dicotyledonous plant, more preferably from the family Brassicaceae, most preferably the nucleic acid is from Arabidopsis thaliana.

[0322] Nucleic acids encoding ExbB polypeptides may be derived from any natural or artificial source. The nucleic acid may be modified from its native form in composition and/or genomic environment through deliberate human manipulation. Preferably the ExbB polypeptide-encoding nucleic acid is from cyanobacterial origin, further preferably from Synechocystis species, most preferably from Synechocystis sp. PCC6803.

[0323] Nucleic acids encoding NMPRT polypeptides may be derived from any natural or artificial source. The nucleic acid may be modified from its native form in composition and/or genomic environment through deliberate human manipulation.

[0324] Performance of the methods of the invention gives plants having enhanced yield-related traits. In particular performance of the methods of the invention gives plants having increased yield, especially increased seed yield relative to control plants. The terms “yield” and “seed yield” are described in more detail in the “definitions” section herein.

[0325] Concerning LEJ1 polypeptides and NMPRT polypeptides, reference herein to enhanced yield-related traits is taken to mean an increase early vigour and/or in biomass (weight) of one or more parts of a plant, which may include aboveground (harvestable) parts and/or (harvestable) parts below ground. In particular, such harvestable parts are seeds, and performance of the methods of the invention results in plants having increased seed yield relative to the seed yield of control plants.

[0326] The present invention provides a method for increasing yield-related traits, especially seed yield of plants, relative to control plants, which method comprises modulating expression in a plant of a nucleic acid encoding an LEJ1 polypeptide, or an ExbB polypeptide, or an NMPRT polypeptide, as defined herein.

[0327] Concerning NMPRT polypeptides, in a preferred embodiment a method for increasing seed yield is provided comprising modulating expression in a plant of a nucleic acid encoding a NMPRT polypeptide as defined herein, and wherein and wherein said enhanced seed yield is one or more of:
[0328] (i) increased filling rate;
[0329] (ii) increased number of flowers per panicle; and
[0330] (iii) increased thousand kernel weight (TKW).

[0331] In another preferred embodiment a method for increasing at least one yield-related parameter is provided comprising modulating expression in a plant of a nucleic acid encoding a NMPRT polypeptide as defined herein, and wherein said increased yield-related parameter is an increased root/shoot index.

[0332] Since the transgenic plants according to the present invention have increased yield-related traits, it is likely that these plants exhibit an increased growth rate (during at least part of their life cycle), relative to the growth rate of control plants at a corresponding stage in their life cycle.

[0333] According to a preferred feature of the present invention, performance of the methods of the invention gives plants having an increased growth rate relative to control plants. Therefore, according to the present invention, there is provided a method for increasing the growth rate of plants, which method comprises modulating expression in a plant of a nucleic acid encoding an LEJ1 polypeptide, or an ExbB polypeptide, or an NMPRT polypeptide, as defined herein.

[0334] Performance of the methods of the invention gives plants grown under non-stress conditions or under mild drought conditions increased yield relative to control plants grown under comparable conditions. Therefore, according to the present invention, there is provided a method for increasing yield in plants grown under non-stress conditions or under mild drought conditions, which method comprises modulating expression in a plant of a nucleic acid encoding an LEJ1 polypeptide, or an ExbB polypeptide, or an NMPRT polypeptide.

[0335] Performance of the methods of the invention gives plants grown under conditions of nutrient deficiency, particularly under conditions of nitrogen deficiency, increased yield relative to control plants grown under comparable conditions. Therefore, according to the present invention, there is provided a method for increasing yield in plants grown under conditions of nutrient deficiency, which method comprises modulating expression in a plant of a nucleic acid encoding an LEJ1 polypeptide, or an ExbB polypeptide, or an NMPRT polypeptide.

[0336] Performance of the methods of the invention gives plants grown under conditions of salt stress, increased yield relative to control plants grown under comparable conditions. Therefore, according to the present invention, there is provided a method for increasing yield in plants grown under conditions of salt stress, which method comprises modulating expression in a plant of a nucleic acid encoding an LEJ1 polypeptide, or an ExbB polypeptide, or an NMPRT polypeptide.

[0337] Performance of the methods of the invention gives plants grown under conditions of drought stress, increased yield relative to control plants grown under comparable conditions. Therefore, according to the present invention, there is provided a method for increasing yield in plants grown under conditions of drought stress, which method comprises modulating expression in a plant of a nucleic acid encoding an LEJ1 polypeptide, or an ExbB polypeptide, or an NMPRT polypeptide.

[0338] The invention also provides genetic constructs and vectors to facilitate introduction and/or expression in plants of nucleic acids encoding LEJ1 polypeptides, or ExbB polypeptides, or NMPRT polypeptides. The gene constructs may be inserted into vectors, which may be commercially available, suitable for transforming into plants and suitable for expression of the gene of interest in the transformed cells. The invention also provides use of a gene construct as defined herein in the methods of the invention.

[0339] More specifically, the present invention provides a construct comprising:
[0340] (a) a nucleic acid encoding an LEJ1 polypeptide, or an ExbB polypeptide, or a NMPRT as defined above;
[0341] (b) one or more control sequences capable of driving expression of the nucleic acid sequence of (a); and optionally
[0342] (c) a transcription termination sequence.

[0343] Preferably, the nucleic acid encoding an LEJ1 polypeptide, or an ExbB polypeptide, or an NMPRT polypeptide, is as defined above. The term “control sequence” and “termination sequence” are as defined herein.

[0344] The invention furthermore provides plants transformed with a construct as described above. In particular, the invention provides plants transformed with a construct as described above, which plants have increased yield-related traits as described herein.

[0345] Plants are transformed with a vector comprising any of the nucleic acids described above. The skilled artisan is well aware of the genetic elements that must be present on the vector in order to successfully transform, select and propagate host cells containing the sequence of interest. The sequence of interest is operably linked to one or more control sequences (at least to a promoter).

[0346] Advantageously, any type of promoter, whether natural or synthetic, may be used to drive expression of the nucleic acid sequence, but preferably the promoter is of plant origin. A constitutive promoter is particularly useful in the methods. Preferably the constitutive promoter is a ubiquitous constitutive promoter of medium strength. See the “Definitions” section herein for definitions of the various promoter types.

[0347] Concerning LEJ1 polypeptides, it should be clear that the applicability of the present invention is not restricted to the LEJ1 polypeptide-encoding nucleic acid represented by SEQ ID NO: 1, nor is the applicability of the invention restricted to expression of an LEJ1 polypeptide-encoding nucleic acid when driven by a constitutive promoter.

[0348] Concerning ExbB polypeptides, it should be clear that the applicability of the present invention is not restricted to the ExbB polypeptide-encoding nucleic acid represented by SEQ ID NO: 211, nor is the applicability of the invention restricted to expression of an ExbB polypeptide-encoding nucleic acid when driven by a constitutive promoter, or when driven by a root-specific promoter.

[0349] Concerning NMPRT polypeptides, it should be clear that the applicability of the present invention is not restricted to the NMPRT polypeptide-encoding nucleic acid represented by SEQ ID NO: 281, nor is the applicability of the invention restricted to expression of a NMPRT polypeptide-encoding nucleic acid when driven by a constitutive promoter.

[0350] The constitutive promoter is preferably a medium strength promoter. More preferably it is a plant derived promoter, such as a GOS2 promoter or a promoter of substantially the same strength and having substantially the same expression pattern (a functionally equivalent promoter), more preferably the GOS2 promoter from rice. Further preferably the constitutive promoter is represented by a nucleic acid sequence substantially similar to SEQ ID NO: 201, or SEQ ID NO: 275, or SEQ ID NO: 324, most preferably the constitutive promoter is as represented by SEQ ID NO: 201 or SEQ ID NO: 275 or SEQ ID NO: 324. See the “Definitions” section herein for further examples of constitutive promoters.

[0351] Optionally, one or more terminator sequences may be used in the construct introduced into a plant. Preferably, the construct comprises an expression cassette comprising a rice GOS2 promoter, substantially similar to SEQ ID NO: 201, and the nucleic acid encoding the LEJ1 polypeptide. More preferably, the expression cassette comprises the sequence represented by SEQ ID NO: 202 (pGOS2::LEJ1::t-zein sequence). Furthermore, one or more sequences encoding selectable markers may be present on the construct introduced into a plant.

[0352] Concerning ExbB polypeptides, the constitutive promoter is preferably a medium strength promoter. More preferably it is a plant derived promoter, such as a GOS2 promoter or a promoter of substantially the same strength and having substantially the same expression pattern (a functionally equivalent promoter), more preferably the promoter is the promoter GOS2 promoter from rice. Further preferably the constitutive promoter is represented by a nucleic acid sequence substantially similar to SEQ ID NO: 275, most preferably the constitutive promoter is as represented by SEQ ID NO: 275. See the “Definitions” section herein for further examples of constitutive promoters.

[0353] According to another preferred feature of the invention, the nucleic acid encoding an ExbB polypeptide is operably linked to a root-specific promoter. The root-specific promoter is preferably an RCc3 promoter (Plant Mol. Biol. 1995 January; 27(2):237-48) or a promoter of substantially the same strength and having substantially the same expression pattern (a functionally equivalent promoter), more preferably the RCc3 promoter is from rice, further preferably the RCc3 promoter is represented by a nucleic acid sequence substantially similar to SEQ ID NO: 276, most preferably the promoter is as represented by SEQ ID NO: 276. Examples of other root-specific promoters which may also be used to perform the methods of the invention are shown in Table 2b in the “Definitions” section above.

[0354] Optionally, one or more terminator sequences may be used in the construct introduced into a plant. Preferably, the construct comprises an expression cassette comprising a constitutive promoter, substantially similar to SEQ ID NO: 275, and the nucleic acid encoding the ExbB polypeptide. More preferably, the expression cassette comprises the sequence represented by SEQ ID NO: 279 (pGOS2::ExbB::terminator sequence).

[0355] Furthermore, one or more sequences encoding selectable markers may be present on the construct introduced into a plant.

[0356] In another preferable embodiment, the construct comprises an expression cassette comprising a root-specific promoter, substantially similar to SEQ ID NO: 276, and the nucleic acid encoding the ExbB polypeptide. More preferably, the expression cassette comprises the sequence represented by SEQ ID NO: 280 (pRs::ExbB::terminator sequence). Furthermore, one or more sequences encoding selectable markers may be present on the construct introduced into a plant.

[0357] Concerning NMPRT polypeptides, the constitutive promoter is preferably a medium strength promoter. More preferably it is a plant derived promoter, such as a GOS2 promoter or a promoter of substantially the same strength and having substantially the same expression pattern, i.e. a functionally equivalent promoter, more preferably the promoter is the promoter GOS2 promoter from rice. Further preferably the constitutive promoter is represented by a nucleic acid sequence substantially similar to SEQ ID NO: 324, most preferably the constitutive promoter is as represented by SEQ ID NO: 324. See the “Definitions” section herein for further examples of constitutive promoters.

[0358] Optionally, one or more terminator sequences may be used in the construct introduced into a plant. Preferably, the construct comprises an expression cassette comprising a promoter which is substantially similar to SEQ ID NO: 324, and the nucleic acid encoding the NMPRT polypeptide. More preferably, the expression cassette comprises the sequence represented by SEQ ID NO: 327 (pGOS2::NMPRT::terminator). Furthermore, one or more sequences encoding selectable markers may be present on the construct introduced into a plant. For an example thereof, see Example 7.

[0359] According to a preferred feature of the invention, the modulated expression is increased expression. Methods for increasing expression of nucleic acids or genes, or gene products, are well documented in the art and examples are provided in the definitions section.

[0360] As mentioned above, a preferred method for modulating expression of a nucleic acid encoding an LEJ1 polypeptide, or an ExbB polypeptide, or an NMPRT polypeptide, is by introducing and expressing in a plant a nucleic acid encoding an LEJ1 polypeptide, or an ExbB polypeptide, or an NMPRT polypeptide; however the effects of performing the method, i.e. enhancing yield-related traits may also be achieved using other well known techniques, including but not limited to T-DNA activation tagging, TILLING, homologous recombination. A description of these techniques is provided in the definitions section.

[0361] The invention also provides a method for the production of transgenic plants having enhanced yield-related traits relative to control plants, comprising introduction and expression in a plant of any nucleic acid encoding an LEJ1 polypeptide, or an ExbB polypeptide, or an NMPRT polypeptide, as defined hereinabove.

[0362] More specifically, the present invention provides a method for the production of transgenic plants having enhanced yield-related traits, particularly increased yield, more particularly increased seed yield, which method comprises:
[0363] (i) introducing and expressing in a plant or plant cell an LEJ1 polypeptide, or an ExbB polypeptide, nucleic acid or a genetic construct comprising a nucleic acid encoding an LEJ1 polypeptide, or an ExbB polypeptide; and
[0364] (ii) cultivating the plant cell under conditions promoting plant growth and development.

[0365] The nucleic acid of (i) may be any of the nucleic acids capable of encoding an LEJ1 polypeptide, or an ExbB polypeptide, as defined herein.

[0366] Concerning NMPRT polypeptides, more specifically, the present invention provides a method for the production of transgenic plants having enhanced yield-related traits, particularly increased seed yield, and more preferably including one or more of (i) increased filling rate; (ii) increased number of flowers per panicle; and (iii) increased thousand kernel weight (TKW), which method comprises:
[0367] (i) introducing and expressing in a plant or plant cell a NMPRT polypeptide-encoding nucleic acid or a genetic construct comprising a NMPRT polypeptide-encoding nucleic acid; and
[0368] (ii) cultivating the plant cell under conditions promoting plant growth and development.

[0369] In another embodiment, the present invention provides a method for the production of transgenic plants having enhanced yield-related traits, particularly increased root biomass as e.g. expressed in increased root/shoot index, which method comprises:
[0370] (i) introducing and expressing in a plant or plant cell a NMPRT polypeptide-encoding nucleic acid or a genetic construct comprising a NMPRT polypeptide-encoding nucleic acid; and
[0371] (ii) cultivating the plant cell under conditions promoting plant growth and development.

[0372] The nucleic acid of (i) may be any of the nucleic acids capable of encoding a NMPRT polypeptide as defined herein.

[0373] The nucleic acid may be introduced directly into a plant cell or into the plant itself (including introduction into a tissue, organ or any other part of a plant). According to a preferred feature of the present invention, the nucleic acid is preferably introduced into a plant by transformation. The term “transformation” is described in more detail in the “definitions” section herein.

[0374] The present invention clearly extends to any plant cell or plant produced by any of the methods described herein, and to all plant parts and propagules thereof. The present invention encompasses plants or parts thereof (including seeds) obtainable by the methods according to the present invention. The plants or parts thereof comprise a nucleic acid transgene encoding an LEJ1 polypeptide, or an ExbB polypeptide, or an NMPRT polypeptide, as defined above. The present invention extends further to encompass the progeny of a primary transformed or transfected cell, tissue, organ or whole plant that has been produced by any of the aforementioned methods, the only requirement being that progeny exhibit the same genotypic and/or phenotypic characteristic(s) as those produced by the parent in the methods according to the invention.

[0375] The invention also includes host cells containing an isolated nucleic acid encoding an LEJ1 polypeptide, or an ExbB polypeptide, or an NMPRT polypeptide, as defined hereinabove. Preferred host cells according to the invention are bacterial, yeast, fungal or plant cells. Host plants for the nucleic acids or the vector used in the method according to the invention, the expression cassette or construct or vector are, in principle, advantageously all plants, which are capable of synthesizing the polypeptides used in the inventive method.

[0376] The methods of the invention are advantageously applicable to any plant, in particular to any plant as defined herein. Plants that are particularly useful in the methods of the invention include all plants which belong to the superfamily Viridiplantae, in particular monocotyledonous and dicotyledonous plants including fodder or forage legumes, ornamental plants, food crops, trees or shrubs.

[0377] According to an embodiment of the present invention, the plant is a crop plant. Examples of crop plants include but are not limited to chicory, carrot, cassava, trefoil, soybean, beet, sugar beet, sunflower, canola, alfalfa, rapeseed, linseed, cotton, tomato, potato and tobacco.

[0378] According to another embodiment of the present invention, the plant is a monocotyledonous plant. Examples of monocotyledonous plants include sugarcane.

[0379] According to another embodiment of the present invention, the plant is a cereal. Examples of cereals include rice, maize, wheat, barley, millet, rye, triticale, sorghum, emmer, spelt, secale, einkorn, teff, milo and oats.

[0380] The invention also extends to harvestable parts of a plant such as, but not limited to seeds, leaves, fruits, flowers, stems, roots, rhizomes, tubers and bulbs, which harvestable parts comprise a recombinant nucleic acid encoding an LEJ1 polypeptide, or an ExbB polypeptide, or an NMPRT polypeptide. The invention furthermore relates to products derived, preferably directly derived, from a harvestable part of such a plant, such as dry pellets or powders, oil, fat and fatty acids, starch or proteins.

[0381] The present invention also encompasses use of nucleic acids encoding LEJ1 polypeptides, or ExbB polypeptides, or NMPRT polypeptides, as described herein and use of these LEJ1 polypeptides, or ExbB polypeptides, or NMPRT polypeptides, in enhancing any of the aforementioned yield-related traits in plants. For example, nucleic acids encoding an LEJ1 polypeptide, or an ExbB polypeptide, or an NMPRT polypeptide, described herein, or the LEJ1 polypeptides, or ExbB polypeptides, or NMPRT polypeptides, themselves, may find use in breeding programmes in which a DNA marker is identified which may be genetically linked to a gene encoding an LEJ1 polypeptide, or an ExbB polypeptide, or an NMPRT polypeptide. The nucleic acids/genes, or the LEJ1 polypeptides, or ExbB polypeptides, or NMPRT polypeptides, themselves may be used to define a molecular marker. This DNA or protein marker may then be used in breeding programmes to select plants having enhanced yield-related traits as defined hereinabove in the methods of the invention. Furthermore, allelic variants of a nucleic acid/gene encoding an LEJ1 polypeptide, or an ExbB polypeptide, or an NMPRT polypeptide, may find use in marker-assisted breeding programmes. Nucleic acids encoding LEJ1 polypeptides, or ExbB polypeptides, or NMPRT polypeptides, may also be used as probes for genetically and physically mapping the genes that they are a part of, and as markers for traits linked to those genes. Such information may be useful in plant breeding in order to develop lines with desired phenotypes.

[0382] It is noted that embodiments as provided herein can be combined, unless explicitly stated otherwise. Headings used herein are given for convenience only and are not intended to limit the present application or to affect its interpretation in any way.

[0383] AP2-26-like Polypeptide

[0384] Surprisingly, it has now been found that modulating expression in a plant of a nucleic acid encoding an AP2-26-like polypeptide gives plants having enhanced yield-related traits relative to control plants.

[0385] According to a first embodiment, the present invention provides a method for enhancing yield-related traits in plants relative to control plants, comprising modulating expression in a plant of a nucleic acid encoding an AP2-26-like polypeptide and optionally selecting for plants having enhanced yield-related traits. According to another embodiment, the present invention provides a method for producing plants having enhancing yield-related traits relative to control plants, wherein said method comprises the steps of modulating expression in said plant of a nucleic acid encoding an AP2-26-like polypeptide as described herein and optionally selecting for plants having enhanced yield-related traits.

[0386] A preferred method for modulating (preferably, increasing) expression of a nucleic acid encoding an AP2-26-like polypeptide is by introducing and expressing in a plant a nucleic acid encoding an AP2-26-like polypeptide.

[0387] Any reference hereinafter to a “protein useful in the methods of the invention” is taken to mean an AP2-26-like polypeptide as defined herein. Any reference hereinafter to a “nucleic acid useful in the methods of the invention” is taken to mean a nucleic acid capable of encoding such an AP2-26-like polypeptide. The nucleic acid to be introduced into a plant (and therefore useful in performing the methods of the invention) is any nucleic acid encoding the type of protein which will now be described, hereafter also named “AP2-26-like nucleic acid” or “AP2-26-like gene”.

[0388] A “AP2-26-like polypeptide” as defined herein refers to any polypeptide comprising single AP2 domain (PFam entry PF00847, see also Example 15) and having transcription factor activity. Preferably, the AP2-26-like polypeptide also comprises one or more of the following motifs:

Motif 13 (SEQ ID NO: 378):
KLYRGVRQRHWGKWVAEIRLP[RK]NRTRLWLGTFDTAE[ED]AAL[TA]YD[KQ]AA[YF][RK]
LR
Motif 14 (SEQ ID NO: 379):
[GHA][ELS][YRA][GKP]PL[DH][AS][SAT]VDAKL[QE]AIC[DQ][TSN][ILM]
Motif 15 (SEQ ID NO: 380):
PS[YVWL]EIDW

[0389] The term “AP2-26-like” or “AP2-26-like polypeptide” as used herein also intends to include homologues as defined hereunder of “AP2-26-like polypeptide”.

[0390] Motifs 13 to 15 were derived using the MEME algorithm (Bailey and Elkan, Proceedings of the Second International Conference on Intelligent Systems for Molecular Biology, pp. 28-36, AAAI Press, Menlo Park, Calif., 1994) or the multiple alignment of FIG. 16. At each position within a MEME motif, the residues are shown that are present in the query set of sequences with a frequency higher than 0.2. Residues within square brackets represent alternatives.

[0391] More preferably, the AP2-26-like polypeptide comprises in increasing order of preference 1, 2 or all 3 motifs.

[0392] Additionally or alternatively, the homologue of an AP2-26-like protein has in increasing order of preference at least 80%, 81%, 82%, 83%, 84%, 85%, 86%, 87%, 88%, 89%, 90%, 91%, 92%, 93%, 94%, 95%, 96%, 97%, 98%, or 99% overall sequence identity to the amino acid represented by SEQ ID NO: 329, provided that the homologous protein comprises any one or more of the conserved motifs as outlined above. The overall sequence identity is determined using a global alignment algorithm, such as the Needleman Wunsch algorithm in the program GAP (GCG Wisconsin Package, Accelrys), preferably with default parameters and preferably with sequences of mature proteins (i.e. without taking into account secretion signals or transit peptides). Compared to overall sequence identity, the sequence identity will generally be higher when only conserved domains or motifs are considered. Preferably the motifs in an AP2-26-like polypeptide have, in increasing order of preference, at least 70%, 71%, 72%, 73%, 74%, 75%, 76%, 77%, 78%, 79%, 80%, 81%, 82%, 83%, 84%, 85%, 86%, 87%, 88%, 89%, 90%, 91%, 92%, 93%, 94%, 95%, 96%, 97%, 98%, or 99% sequence identity to any one or more of the motifs represented by SEQ ID NO: 378 to SEQ ID NO: 380 (Motifs 13 to 15).

[0393] In other words, in another embodiment a method is provided wherein said AP2-26-like polypeptide comprises a conserved domain (or motif) with at least 70%, 71%, 72%, 73%, 74%, 75%, 76%, 77%, 78%, 79%, 80%, 81%, 82%, 83%, 84%, 85%, 86%, 87%, 88%, 89%, 90%, 91%, 92%, 93%, 94%, 95%, 96%, 97%, 98%, or 99% sequence identity to the conserved domain starting with amino acid 104 up to amino acid 152 in SEQ ID NO:329).

[0394] The terms “domain”, “signature” and “motif” are defined in the “definitions” section herein.

[0395] Preferably, the polypeptide sequence which when used in the construction of a phylogenetic tree, such as the one depicted in FIG. 17, clusters within the group of AP2-26-like polypeptides comprising the amino acid sequence represented by SEQ ID NO: 329 rather than with any other group.

[0396] Furthermore, AP2-26-like polypeptides (at least in their native form) typically have DNA binding activity. Tools and techniques for measuring DNA binding activity are well known in the art, for example electrophoretic mobility shift assays and footprinting studies of motifs frequently occurring in plant promoter regions (Gasser 2003, Plant Mol. Biol. 53(3):281-95 and references therein; Nieto-Sotelo et al. 1994 Plant Cell 6: 287-301; Zhang et al. 2003 Biochemistry 42: 6596-6607; Klosterman 2002 Plant Science 162, 855-866). Further details are provided in Example 17.

[0397] In addition, AP2-26-like polypeptides, when expressed in rice according to the methods of the present invention as outlined in Examples 18 and 19, give plants having increased yield related traits, in particular increased early vigour and/or increased harvest index.

[0398] The present invention is illustrated by transforming plants with the nucleic acid sequence represented by SEQ ID NO: 328, encoding the polypeptide sequence of SEQ ID NO: 329. However, performance of the invention is not restricted to these sequences; the methods of the invention may advantageously be performed using any AP2-26-like-encoding nucleic acid or AP2-26-like polypeptide as defined herein.

[0399] Examples of nucleic acids encoding AP2-26-like polypeptides are given in Table F of the Examples section herein. Such nucleic acids are useful in performing the methods of the invention. The amino acid sequences given in Table F of the Examples section are example sequences of orthologues and paralogues of the AP2-26-like polypeptide represented by SEQ ID NO: 329, the terms “orthologues” and “paralogues” being as defined herein. Further orthologues and paralogues may readily be identified by performing a so-called reciprocal blast search as described in the definitions section; where the query sequence is SEQ ID NO: 328 or SEQ ID NO: 329, the second BLAST (back-BLAST) would be against rice sequences.

[0400] The invention also provides hitherto unknown AP2-26-like-encoding nucleic acids and AP2-26-like polypeptides useful for conferring enhanced yield-related traits in plants relative to control plants.

[0401] According to a further embodiment of the present invention, there is therefore provided an isolated nucleic acid molecule selected from:
[0402] (i) a nucleic acid represented by SEQ ID NO: 352 and 338;
[0403] (ii) the complement of a nucleic acid represented by SEQ ID NO: SEQ ID NO: 352 and 338;
[0404] (iii) a nucleic acid encoding an AP2-26-like polypeptide having in increasing order of preference at least 50%, 51%, 52%, 53%, 54%, 55%, 56%, 57%, 58%, 59%, 60%, 61%, 62%, 63%, 64%, 65%, 66%, 67%, 68%, 69%, 70%, 71%, 72%, 73%, 74%, 75%, 76%, 77%, 78%, 79%, 80%, 81%, 82%, 83%, 84%, 85%, 86%, 87%, 88%, 89%, 90%, 91%, 92%, 93%, 94%, 95%, 96%, 97%, 98%, or 99% sequence identity to the amino acid sequence represented by SEQ ID NO: SEQ ID NO: 353 and 339, and additionally or alternatively comprising one or more motifs having in increasing order of preference at least 50%, 55%, 60%, 65%, 70%, 75%, 80%, 85%, 90%, 95%, 96%, 97%, 98%, 99% or more sequence identity to the motifs given in SEQ ID NO: 378 to SEQ ID NO: 380, and further preferably conferring enhanced yield-related traits relative to control plants.
[0405] (iv) a nucleic acid molecule which hybridizes with a nucleic acid molecule of (i) to (iii) under high stringency hybridization conditions and preferably confers enhanced yield-related traits relative to control plants.

[0406] According to a further embodiment of the present invention, there is also provided an isolated polypeptide selected from:
[0407] (i) an amino acid sequence represented by SEQ ID NO: SEQ ID NO: 353 and 339;
[0408] (ii) an amino acid sequence having, in increasing order of preference, at least 80%, 81%, 82%, 83%, 84%, 85%, 86%, 87%, 88%, 89%, 90%, 91%, 92%, 93%, 94%, 95%, 96%, 97%, 98%, or 99% sequence identity to the amino acid sequence represented by SEQ ID NO: SEQ ID NO: 353 and 339, and additionally or alternatively comprising one or more motifs having in increasing order of preference at least 50%, 55%, 60%, 65%, 70%, 75%, 80%, 85%, 90%, 95%, 96%, 97%, 98%, 99% or more sequence identity to the motifs given in SEQ ID NO: 378 to SEQ ID NO: 380, and further preferably conferring enhanced yield-related traits relative to control plants;
[0409] (iii) derivatives of any of the amino acid sequences given in (i) or (ii) above.

[0410] Nucleic acid variants may also be useful in practising the methods of the invention. Examples of such variants include nucleic acids encoding homologues and derivatives of any one of the amino acid sequences given in Table F of the Examples section, the terms “homologue” and “derivative” being as defined herein. Also useful in the methods of the invention are nucleic acids encoding homologues and derivatives of orthologues or paralogues of any one of the amino acid sequences given in Table F of the Examples section. Homologues and derivatives useful in the methods of the present invention have substantially the same biological and functional activity as the unmodified protein from which they are derived. Further variants useful in practising the methods of the invention are variants in which codon usage is optimised or in which miRNA target sites are removed.

[0411] Further nucleic acid variants useful in practising the methods of the invention include portions of nucleic acids encoding AP2-26-like polypeptides, nucleic acids hybridising to nucleic acids encoding AP2-26-like polypeptides, splice variants of nucleic acids encoding AP2-26-like polypeptides, allelic variants of nucleic acids encoding AP2-26-like polypeptides and variants of nucleic acids encoding AP2-26-like polypeptides obtained by gene shuffling. The terms hybridising sequence, splice variant, allelic variant and gene shuffling are as described herein.

[0412] Nucleic acids encoding AP2-26-like polypeptides need not be full-length nucleic acids, since performance of the methods of the invention does not rely on the use of full-length nucleic acid sequences. According to the present invention, there is provided a method for enhancing yield-related traits in plants, comprising introducing and expressing in a plant a portion of any one of the nucleic acid sequences given in Table F of the Examples section, or a portion of a nucleic acid encoding an orthologue, paralogue or homologue of any of the amino acid sequences given in Table F of the Examples section.

[0413] A portion of a nucleic acid may be prepared, for example, by making one or more deletions to the nucleic acid. The portions may be used in isolated form or they may be fused to other coding (or non-coding) sequences in order to, for example, produce a protein that combines several activities. When fused to other coding sequences, the resultant polypeptide produced upon translation may be bigger than that predicted for the protein portion.

[0414] Portions useful in the methods of the invention, encode an AP2-26-like polypeptide as defined herein, and have substantially the same biological activity as the amino acid sequences given in Table F of the Examples section. Preferably, the portion is a portion of any one of the nucleic acids given in Table F of the Examples section, or is a portion of a nucleic acid encoding an orthologue or paralogue of any one of the amino acid sequences given in Table F of the Examples section. Preferably the portion is at least 500, 550, 600, 650, 700, 750, 800, 850, 900, 950, 1000, 1050, 1100 consecutive nucleotides in length, the consecutive nucleotides being of any one of the nucleic acid sequences given in Table F of the Examples section, or of a nucleic acid encoding an orthologue or paralogue of any one of the amino acid sequences given in Table F of the Examples section. Most preferably the portion is a portion of the nucleic acid of SEQ ID NO: 328. Preferably, the portion encodes a fragment of an amino acid sequence which, when used in the construction of a phylogenetic tree, such as the one depicted in FIG. 17, clusters within the group of AP2-26-like polypeptides comprising the amino acid sequence represented by SEQ ID NO: 329 rather than with any other group, and/or comprises any of motif 13 to 15, and/or has DNA binding activity, and/or has at least 80% sequence identity to SEQ ID NO: 329.

[0415] Another nucleic acid variant useful in the methods of the invention is a nucleic acid capable of hybridising, under reduced stringency conditions, preferably under stringent conditions, with a nucleic acid encoding an AP2-26-like polypeptide as defined herein, or with a portion as defined herein.

[0416] According to the present invention, there is provided a method for enhancing yield-related traits in plants, comprising introducing and expressing in a plant a nucleic acid capable of hybridizing to any one of the nucleic acids given in Table F of the Examples section, or comprising introducing and expressing in a plant a nucleic acid capable of hybridising to a nucleic acid encoding an orthologue, paralogue or homologue of any of the nucleic acid sequences given in Table F of the Examples section.

[0417] Hybridising sequences useful in the methods of the invention encode an AP2-26-like polypeptide as defined herein, having substantially the same biological activity as the amino acid sequences given in Table F of the Examples section. Preferably, the hybridising sequence is capable of hybridising to the complement of any one of the nucleic acids given in Table F of the Examples section, or to a portion of any of these sequences, a portion being as defined above, or the hybridising sequence is capable of hybridising to the complement of a nucleic acid encoding an orthologue or paralogue of any one of the amino acid sequences given in Table F of the Examples section. Most preferably, the hybridising sequence is capable of hybridising to the complement of a nucleic acid as represented by SEQ ID NO: 328 or to a portion thereof.

[0418] Preferably, the hybridising sequence encodes a polypeptide with an amino acid sequence which, when full-length and when used in the construction of a phylogenetic tree, such as the one depicted in FIG. 17, clusters within the group of AP2-26-like polypeptides comprising the amino acid sequence represented by SEQ ID NO: 329 rather than with any other group, and/or comprises any of motifs 13 to 15, and/or has DNA binding activity, and/or has at least 80% sequence identity to SEQ ID NO: 329.

[0419] Another nucleic acid variant useful in the methods of the invention is a splice variant encoding an AP2-26-like polypeptide as defined hereinabove, a splice variant being as defined herein.

[0420] According to the present invention, there is provided a method for enhancing yield-related traits in plants, comprising introducing and expressing in a plant a splice variant of any one of the nucleic acid sequences given in Table F of the Examples section, or a splice variant of a nucleic acid encoding an orthologue, paralogue or homologue of any of the amino acid sequences given in Table F of the Examples section.

[0421] Preferred splice variants are splice variants of a nucleic acid represented by SEQ ID NO: 328, or a splice variant of a nucleic acid encoding an orthologue or paralogue of SEQ ID NO: 329. Preferably, the amino acid sequence encoded by the splice variant, when used in the construction of a phylogenetic tree, such as the one depicted in FIG. 17, clusters within the group of AP2-26-like polypeptides comprising the amino acid sequence represented by SEQ ID NO: 329 rather than with any other group, and/or comprises any of motifs 13 to 15, and/or has DNA binding activity, and/or has at least 80% sequence identity to SEQ ID NO: 329.

[0422] Another nucleic acid variant useful in performing the methods of the invention is an allelic variant of a nucleic acid encoding an AP2-26-like polypeptide as defined hereinabove, an allelic variant being as defined herein.

[0423] According to the present invention, there is provided a method for enhancing yield-related traits in plants, comprising introducing and expressing in a plant an allelic variant of any one of the nucleic acids given in Table F of the Examples section, or comprising introducing and expressing in a plant an allelic variant of a nucleic acid encoding an orthologue, paralogue or homologue of any of the amino acid sequences given in Table F of the Examples section.

[0424] The polypeptides encoded by allelic variants useful in the methods of the present invention have substantially the same biological activity as the AP2-26-like polypeptide of SEQ ID NO: 329 and any of the amino acids depicted in Table F of the Examples section. Allelic variants exist in nature, and encompassed within the methods of the present invention is the use of these natural alleles. Preferably, the allelic variant is an allelic variant of SEQ ID NO: 328 or an allelic variant of a nucleic acid encoding an orthologue or paralogue of SEQ ID NO: 329. Preferably, the amino acid sequence encoded by the allelic variant when used in the construction of a phylogenetic tree, such as the one depicted in FIG. 17, clusters within the group of AP2-26-like polypeptides comprising the amino acid sequence represented by SEQ ID NO: 329 rather than with any other group, and/or comprises any of motifs 12 to 15, and/or has DNA binding activity, and/or has at least 80% sequence identity to SEQ ID NO: 329.

[0425] Gene shuffling or directed evolution may also be used to generate variants of nucleic acids encoding AP2-26-like polypeptides as defined above; the term “gene shuffling” being as defined herein.

[0426] According to the present invention, there is provided a method for enhancing yield-related traits in plants, comprising introducing and expressing in a plant a variant of any one of the nucleic acid sequences given in Table F of the Examples section, or comprising introducing and expressing in a plant a variant of a nucleic acid encoding an orthologue, paralogue or homologue of any of the amino acid sequences given in Table F of the Examples section, which variant nucleic acid is obtained by gene shuffling.

[0427] Preferably, the amino acid sequence encoded by the variant nucleic acid obtained by gene shuffling, when used in the construction of a phylogenetic tree, such as the one depicted in FIG. 17, clusters within the group of AP2-26-like polypeptides comprising the amino acid sequence represented by SEQ ID NO: 329 rather than with any other group, and/or comprises any of motifs 13 to 15, and/or has DNA binding activity, and/or has at least 80% sequence identity to SEQ ID NO: 329.

[0428] Furthermore, nucleic acid variants may also be obtained by site-directed mutagenesis. Several methods are available to achieve site-directed mutagenesis, the most common being PCR based methods (Current Protocols in Molecular Biology. Wiley Eds.).

[0429] Nucleic acids encoding AP2-26-like polypeptides may be derived from any natural or artificial source. The nucleic acid may be modified from its native form in composition and/or genomic environment through deliberate human manipulation. Preferably the AP2-26-like polypeptide-encoding nucleic acid is from a plant, further preferably from a monocotyledonous plant, more preferably from the family Poaceae, most preferably the nucleic acid is from Oryza sativa.

[0430] Performance of the methods of the invention gives plants having enhanced yield-related traits. In particular performance of the methods of the invention gives plants having increased early vigour and increased yield, especially increased seed yield relative to control plants. The terms “yield” and “seed yield” are described in more detail in the “definitions” section herein.

[0431] Reference herein to enhanced yield-related traits is taken to mean an increase early vigour and/or in biomass (weight) of one or more parts of a plant, which may include (i) aboveground parts and preferably aboveground harvestable parts and/or (ii) parts below ground and preferably harvestable below ground. In particular, such harvestable parts are seeds, and performance of the methods of the invention results in plants having increased seed yield relative to the seed yield of control plants.

[0432] The present invention provides a method for increasing yield-related traits, especially early vigour and seed yield of plants, relative to control plants, which method comprises modulating expression in a plant of a nucleic acid encoding an AP2-26-like polypeptide as defined herein.

[0433] According to a preferred feature of the present invention, performance of the methods of the invention gives plants having an increased growth rate relative to control plants. Therefore, according to the present invention, there is provided a method for increasing the growth rate of plants, which method comprises modulating expression in a plant of a nucleic acid encoding an AP2-26-like polypeptide as defined herein.

[0434] Performance of the methods of the invention gives plants grown under non-stress conditions or under mild drought conditions increased yield relative to control plants grown under comparable conditions. Therefore, according to the present invention, there is provided a method for increasing yield in plants grown under non-stress conditions or under mild drought conditions, which method comprises modulating expression in a plant of a nucleic acid encoding an AP2-26-like polypeptide.

[0435] Performance of the methods of the invention gives plants grown under conditions of nutrient deficiency, particularly under conditions of nitrogen deficiency, increased yield relative to control plants grown under comparable conditions. Therefore, according to the present invention, there is provided a method for increasing yield in plants grown under conditions of nutrient deficiency, which method comprises modulating expression in a plant of a nucleic acid encoding an AP2-26-like polypeptide.

[0436] Performance of the methods of the invention gives plants grown under conditions of salt stress, increased yield relative to control plants grown under comparable conditions. Therefore, according to the present invention, there is provided a method for increasing yield in plants grown under conditions of salt stress, which method comprises modulating expression in a plant of a nucleic acid encoding an AP2-26-like polypeptide.

[0437] Performance of the methods of the invention gives plants grown under conditions of drought stress, increased yield relative to control plants grown under comparable conditions. Therefore, according to the present invention, there is provided a method for increasing yield in plants grown under conditions of drought stress, which method comprises modulating expression in a plant of a nucleic acid encoding an AP2-26-like polypeptide.

[0438] The invention also provides genetic constructs and vectors to facilitate introduction and/or expression in plants of nucleic acids encoding AP2-26-like polypeptides. The gene constructs may be inserted into vectors, which may be commercially available, suitable for transforming into plants and suitable for expression of the gene of interest in the transformed cells. The invention also provides use of a gene construct as defined herein in the methods of the invention.

[0439] More specifically, the present invention provides a construct comprising:
[0440] (a) a nucleic acid encoding an AP2-26-like polypeptide as defined above;
[0441] (b) one or more control sequences capable of driving expression of the nucleic acid sequence of (a); and optionally
[0442] (c) a transcription termination sequence.

[0443] Preferably, the nucleic acid encoding an AP2-26-like polypeptide is as defined above. The term “control sequence” and “termination sequence” are as defined herein.

[0444] The invention furthermore provides plants transformed with a construct as described above. In particular, the invention provides plants transformed with a construct as described above, which plants have increased yield-related traits as described herein.

[0445] Plants are transformed with a vector comprising any of the nucleic acids described above. The skilled artisan is well aware of the genetic elements that must be present on the vector in order to successfully transform, select and propagate host cells containing the sequence of interest. The sequence of interest is operably linked to one or more control sequences (at least to a promoter).

[0446] Advantageously, any type of promoter, whether natural or synthetic, may be used to drive expression of the nucleic acid sequence, but preferably the promoter is of plant origin. A root-specific promoter is particularly useful in the methods. Also useful in the methods of the invention is a constitutive promoter. Preferably the constitutive promoter is a ubiquitous constitutive promoter of medium strength. See the “Definitions” section herein for definitions of the various promoter types.

[0447] It should be clear that the applicability of the present invention is not restricted to the AP2-26-like polypeptide-encoding nucleic acid represented by SEQ ID NO: 328, nor is the applicability of the invention restricted to expression of an AP2-26-like polypeptide-encoding nucleic acid when driven by a root-specific promoter, or when driven by a constitutive promoter.

[0448] The root-specific promoter is preferably an RCc3 promoter (Plant Mol. Biol. 1995 January; 27(2):237-48) or a promoter of substantially the same strength and having substantially the same expression pattern (a functionally equivalent promoter), more preferably the RCc3 promoter is from rice, further preferably the RCc3 promoter is represented by a nucleic acid sequence substantially similar to SEQ ID NO: 382, most preferably the promoter is as represented by SEQ ID NO: 382. Examples of other root-specific promoters which may also be used to perform the methods of the invention are shown in Table 2b in the “Definitions” section above.

[0449] According to another preferred feature of the invention, the nucleic acid encoding an AP2-26-like polypeptide is operably linked to a constitutive promoter. The constitutive promoter is preferably a medium strength promoter. More preferably it is a plant derived promoter, such as a GOS2 promoter or a promoter of substantially the same strength and having substantially the same expression pattern (a functionally equivalent promoter), more preferably the promoter is the promoter GOS2 promoter from rice. Further preferably the constitutive promoter is represented by a nucleic acid sequence substantially similar to SEQ ID NO: 381, most preferably the constitutive promoter is as represented by SEQ ID NO: 381. See the “Definitions” section herein for further examples of constitutive promoters.

[0450] Optionally, one or more terminator sequences may be used in the construct introduced into a plant. Preferably, the construct comprises an expression cassette comprising a RCc3 or a GOS2 promoter, substantially similar to SEQ ID NO: 382 resp. SEQ ID NO: 381, operably linked to the nucleic acid encoding the AP2-26-like polypeptide. More preferably, the expression cassette comprising the nucleic acid encoding the AP2-26-like polypeptide operably linked to the RCc3 promoter comprises the sequence represented by SEQ ID NO: 382. Furthermore, one or more sequences encoding selectable markers may be present on the construct introduced into a plant.

[0451] According to a preferred feature of the invention, the modulated expression is increased expression. Methods for increasing expression of nucleic acids or genes, or gene products, are well documented in the art and examples are provided in the definitions section.

[0452] As mentioned above, a preferred method for modulating expression of a nucleic acid encoding an AP2-26-like polypeptide is by introducing and expressing in a plant a nucleic acid encoding an AP2-26-like polypeptide; however the effects of performing the method, i.e. enhancing yield-related traits may also be achieved using other well known techniques, including but not limited to T-DNA activation tagging, TILLING, homologous recombination. A description of these techniques is provided in the definitions section.

[0453] The invention also provides a method for the production of transgenic plants having enhanced yield-related traits relative to control plants, comprising introduction and expression in a plant of any nucleic acid encoding an AP2-26-like polypeptide as defined hereinabove.

[0454] More specifically, the present invention provides a method for the production of transgenic plants having enhanced yield-related traits, particularly increased seed yield and/or early vigour, which method comprises:
[0455] (i) introducing and expressing in a plant or plant cell an AP2-26-like polypeptide-encoding nucleic acid or a genetic construct comprising an AP2-26-like polypeptide-encoding nucleic acid; and
[0456] (ii) cultivating the plant cell under conditions promoting plant growth and development.

[0457] Cultivating the plant cell under conditions promoting plant growth and development, may or may not include regeneration and or growth to maturity.

[0458] The nucleic acid of (i) may be any of the nucleic acids capable of encoding an AP2-26-like polypeptide as defined herein.

[0459] The nucleic acid may be introduced directly into a plant cell or into the plant itself (including introduction into a tissue, organ or any other part of a plant). According to a preferred feature of the present invention, the nucleic acid is preferably introduced into a plant by transformation. The term “transformation” is described in more detail in the “definitions” section herein.

[0460] The present invention clearly extends to any plant cell or plant produced by any of the methods described herein, and to all plant parts and propagules thereof. The present invention encompasses plants or parts thereof (including seeds) obtainable by the methods according to the present invention. The plants or parts thereof comprise a nucleic acid transgene encoding an AP2-26-like polypeptide as defined above. The present invention extends further to encompass the progeny of a primary transformed or transfected cell, tissue, organ or whole plant that has been produced by any of the aforementioned methods, the only requirement being that progeny exhibit the same genotypic and/or phenotypic characteristic(s) as those produced by the parent in the methods according to the invention.

[0461] The invention also includes host cells containing an isolated nucleic acid encoding an AP2-26-like polypeptide as defined hereinabove. Preferred host cells according to the invention are bacterial, yeast, fungal or plant cells. Host plants for the nucleic acids or the vector used in the method according to the invention, the expression cassette or construct or vector are, in principle, advantageously all plants, which are capable of synthesizing the polypeptides used in the inventive method.

[0462] The methods of the invention are advantageously applicable to any plant, in particular to any plant as defined herein. Plants that are particularly useful in the methods of the invention include all plants which belong to the superfamily Viridiplantae, in particular monocotyledonous and dicotyledonous plants including fodder or forage legumes, ornamental plants, food crops, trees or shrubs.

[0463] According to an embodiment of the present invention, the plant is a crop plant. Examples of crop plants include but are not limited to chicory, carrot, cassava, trefoil, soybean, beet, sugar beet, sunflower, canola, alfalfa, rapeseed, linseed, cotton, tomato, potato and tobacco.

[0464] According to another embodiment of the present invention, the plant is a monocotyledonous plant. Examples of monocotyledonous plants include sugarcane.

[0465] According to another embodiment of the present invention, the plant is a cereal. Examples of cereals include rice, maize, wheat, barley, millet, rye, triticale, sorghum, emmer, spelt, secale, einkorn, teff, milo and oats.

[0466] The invention also extends to harvestable parts of a plant such as, but not limited to seeds, leaves, fruits, flowers, stems, roots, rhizomes, tubers and bulbs, which harvestable parts comprise a recombinant nucleic acid encoding an AP2-26-like polypeptide. The invention furthermore relates to products derived, preferably directly derived, from a harvestable part of such a plant, such as dry pellets or powders, oil, fat and fatty acids, starch or proteins.

[0467] The present invention also encompasses use of nucleic acids encoding AP2-26-like polypeptides as described herein and use of these AP2-26-like polypeptides in enhancing any of the aforementioned yield-related traits in plants. For example, nucleic acids encoding AP2-26-like polypeptide described herein, or the AP2-26-like polypeptides themselves, may find use in breeding programmes in which a DNA marker is identified which may be genetically linked to an AP2-26-like polypeptide-encoding gene. The nucleic acids/genes, or the AP2-26-like polypeptides themselves may be used to define a molecular marker. This DNA or protein marker may then be used in breeding programmes to select plants having enhanced yield-related traits as defined hereinabove in the methods of the invention. Furthermore, allelic variants of an AP2-26-like polypeptide-encoding nucleic acid/gene may find use in marker-assisted breeding programmes. Nucleic acids encoding AP2-26-like polypeptides may also be used as probes for genetically and physically mapping the genes that they are a part of, and as markers for traits linked to those genes. Such information may be useful in plant breeding in order to develop lines with desired phenotypes.

[0468] HD8-Like Polypeptide

[0469] In another embodiment, it has now been found that modulating expression in a plant of a nucleic acid encoding an HD8-like polypeptide gives plants having enhanced yield-related traits relative to control plants.

[0470] According to a first embodiment, the present invention provides a method for enhancing yield-related traits in plants relative to control plants, comprising modulating expression in a plant of a nucleic acid encoding an HD8-like polypeptide and optionally selecting for plants having enhanced yield-related traits. According to another embodiment, the present invention provides a method for producing plants having enhancing yield-related traits relative to control plants, wherein said method comprises the steps of modulating expression in said plant of a nucleic acid encoding an HD8-like polypeptide as described herein and optionally selecting for plants having enhanced yield-related traits.

[0471] A preferred method for modulating (preferably, increasing) expression of a nucleic acid encoding an HD8-like polypeptide is by introducing and expressing in a plant a nucleic acid encoding an HD8-like polypeptide.

[0472] Any reference hereinafter to a “protein useful in the methods of the invention” is taken to mean an HD8-like polypeptide as defined herein. Any reference hereinafter to a “nucleic acid useful in the methods of the invention” is taken to mean a nucleic acid capable of encoding such an HD8-like polypeptide. The nucleic acid to be introduced into a plant (and therefore useful in performing the methods of the invention) is any nucleic acid encoding the type of protein which will now be described, hereafter also named “HD8-like nucleic acid” or “HD8-like gene”.

[0473] A “HD8-like polypeptide” as defined herein refers to any protein belonging to subfamily IV of the HD-ZIP transcription factors and comprising a Homeobox domain (Pfam PF00046) and a START domain (PF01852), see also Example 26. Preferably, the HD8-like polypeptide comprises one or more of the following motifs:

Motif 16 (SEQ ID NO: 562):
[EAP][TR]Q[IV]K[YF]WFQN[CR]R[ST][KQ][MI]K[KVA][FRQ][QKSH][ENCD][RNG][AETH][D
E][RN][SKNC][LAKI][LY][RQK][KRA][QE]N[EAD][EK][LI][RLK][KAC][TE]N[AMI][AER][LI][RK
Q][NE][RQA][LMI][KR][NGK][VSMA][TI]C
Motif 17 (SEQ ID NO: 563)
[KPR][RK]RY[QH][LR][LH]T[MPA][QR]Q[KI][EQ][ETQR][LM][NE][RAS][LAYM][FD][QLK][ES
A][CS][PF][NPH][FP][LD][ERLD][KNL][DLQ]
Motif 18 (SEQ ID NO: 564)
[DN]G[CRNHY][CS][QRK][ILMV][YVIT][AW][VLIM][DEV]

[0474] The term “HD8-like” or “HD8-like polypeptide” as used herein also intends to include homologues as defined hereunder of “HD8-like polypeptide”.

[0475] Motifs 16, 17 and 18 were derived using the MEME algorithm (Bailey and Elkan, Proceedings of the Second International Conference on Intelligent Systems for Molecular Biology, pp. 28-36, AAAI Press, Menlo Park, Calif., 1994). At each position within a MEME motif, the residues are shown that are present in the query set of sequences with a frequency higher than 0.2. Residues within square brackets represent alternatives.

[0476] More preferably, the HD8-like polypeptide comprises in increasing order of preference, at least 1, at least 2, or all 3 motifs.

[0477] Additionally or alternatively, the homologue of an HD8-like protein has in increasing order of preference at least 25%, 26%, 27%, 28%, 29%, 30%, 31%, 32%, 33%, 34%, 35%, 36%, 37%, 38%, 39%, 40%, 41%, 42%, 43%, 44%, 45%, 46%, 47%, 48%, 49%, 50%, 51%, 52%, 53%, 54%, 55%, 56%, 57%, 58%, 59%, 60%, 61%, 62%, 63%, 64%, 65%, 66%, 67%, 68%, 69%, 70%, 71%, 72%, 73%, 74%, 75%, 76%, 77%, 78%, 79%, 80%, 81%, 82%, 83%, 84%, 85%, 86%, 87%, 88%, 89%, 90%, 91%, 92%, 93%, 94%, 95%, 96%, 97%, 98%, or 99% overall sequence identity to the amino acid represented by SEQ ID NO: 385, provided that the homologous protein comprises any one or more of the conserved motifs as outlined above. The overall sequence identity is determined using a global alignment algorithm, such as the Needleman Wunsch algorithm in the program GAP (GCG Wisconsin Package, Accelrys), preferably with default parameters and preferably with sequences of mature proteins (i.e. without taking into account secretion signals or transit peptides). Compared to overall sequence identity, the sequence identity will generally be higher when only conserved domains or motifs are considered. Preferably the motifs in an HD8-like polypeptide have, in increasing order of preference, at least 70%, 71%, 72%, 73%, 74%, 75%, 76%, 77%, 78%, 79%, 80%, 81%, 82%, 83%, 84%, 85%, 86%, 87%, 88%, 89%, 90%, 91%, 92%, 93%, 94%, 95%, 96%, 97%, 98%, or 99% sequence identity to any one or more of the motifs represented by SEQ ID NO: 562 to SEQ ID NO: 564 (Motifs 16 to 18).

[0478] In other words, in another embodiment a method is provided wherein said HD8-like polypeptide comprises a conserved domain (or motif) with at least 70%, 71%, 72%, 73%, 74%, 75%, 76%, 77%, 78%, 79%, 80%, 81%, 82%, 83%, 84%, 85%, 86%, 87%, 88%, 89%, 90%, 91%, 92%, 93%, 94%, 95%, 96%, 97%, 98%, or 99% sequence identity to the conserved domain starting with amino acid 265 up to amino acid 500 in SEQ ID NO:385.

[0479] The terms “domain”, “signature” and “motif” are defined in the “definitions” section herein.

[0480] Preferably, the polypeptide sequence which when used in the construction of a phylogenetic tree, such as the one depicted in FIG. 17 (Jain et al., FEBS Journal 275, 2845-2861, 2008), clusters within subfamily IV of the HD-ZIP polypeptides, comprising the amino acid sequence represented by SEQ ID NO: 385 (represented as Os08g19590), rather than with any other group.

[0481] Furthermore, HD8-like polypeptides (at least in their native form) typically have DNA binding activity. Tools and techniques for measuring DNA binding activity, such as gel retardation assays, are well known in the art (see for example Sessa et al., EMBO J. 12(9): 3507-3517, 1993). Further details are provided in Example 28.

[0482] In addition, HD8-like polypeptides, when expressed in rice according to the methods of the present invention as outlined in Examples 29 and 30, give plants having increased yield related traits, including total seed weight, seed fill rate, harvest index and/or number of filled seeds

[0483] The present invention is illustrated by transforming plants with the nucleic acid sequence represented by SEQ ID NO: 384, encoding the polypeptide sequence of SEQ ID NO: 385. However, performance of the invention is not restricted to these sequences; the methods of the invention may advantageously be performed using any HD8-like-encoding nucleic acid or HD8-like polypeptide as defined herein.

[0484] Examples of nucleic acids encoding HD8-like polypeptides are given in Table J of the Examples section herein. Such nucleic acids are useful in performing the methods of the invention. The amino acid sequences given in Table J of the Examples section are example sequences of orthologues and paralogues of the HD8-like polypeptide represented by SEQ ID NO: 385, the terms “orthologues” and “paralogues” being as defined herein. Further orthologues and paralogues may readily be identified by performing a so-called reciprocal blast search as described in the definitions section; where the query sequence is SEQ ID NO: 384 or SEQ ID NO: 385, the second BLAST (back-BLAST) would be against rice sequences.

[0485] The invention also provides hitherto unknown HD8-like-encoding nucleic acids and HD8-like polypeptides useful for conferring enhanced yield-related traits in plants relative to control plants.

[0486] Nucleic acid variants may also be useful in practising the methods of the invention. Examples of such variants include nucleic acids encoding homologues and derivatives of any one of the amino acid sequences given in Table J of the Examples section, the terms “homologue” and “derivative” being as defined herein. Also useful in the methods of the invention are nucleic acids encoding homologues and derivatives of orthologues or paralogues of any one of the amino acid sequences given in Table J of the Examples section. Homologues and derivatives useful in the methods of the present invention have substantially the same biological and functional activity as the unmodified protein from which they are derived. Further variants useful in practising the methods of the invention are variants in which codon usage is optimised or in which miRNA target sites are removed.

[0487] Further nucleic acid variants useful in practising the methods of the invention include portions of nucleic acids encoding HD8-like polypeptides, nucleic acids hybridising to nucleic acids encoding HD8-like polypeptides, splice variants of nucleic acids encoding HD8-like polypeptides, allelic variants of nucleic acids encoding HD8-like polypeptides and variants of nucleic acids encoding HD8-like polypeptides obtained by gene shuffling. The terms hybridising sequence, splice variant, allelic variant and gene shuffling are as described herein.

[0488] Nucleic acids encoding HD8-like polypeptides need not be full-length nucleic acids, since performance of the methods of the invention does not rely on the use of full-length nucleic acid sequences. According to the present invention, there is provided a method for enhancing yield-related traits in plants, comprising introducing and expressing in a plant a portion of any one of the nucleic acid sequences given in Table J of the Examples section, or a portion of a nucleic acid encoding an orthologue, paralogue or homologue of any of the amino acid sequences given in Table J of the Examples section.

[0489] A portion of a nucleic acid may be prepared, for example, by making one or more deletions to the nucleic acid. The portions may be used in isolated form or they may be fused to other coding (or non-coding) sequences in order to, for example, produce a protein that combines several activities. When fused to other coding sequences, the resultant polypeptide produced upon translation may be bigger than that predicted for the protein portion.

[0490] Portions useful in the methods of the invention, encode an HD8-like polypeptide as defined herein, and have substantially the same biological activity as the amino acid sequences given in Table J of the Examples section. Preferably, the portion is a portion of any one of the nucleic acids given in Table J of the Examples section, or is a portion of a nucleic acid encoding an orthologue or paralogue of any one of the amino acid sequences given in Table J of the Examples section. Preferably the portion is at least 500, 550, 600, 650, 700, 750, 800, 850, 900, 950, 1000, 1050, 1100, 1150, 1200, 1250, 1300, 1350, 1400, 1450, 1500, 1550, 1600, 1650, 1700, 1750, 1800, 1850, 1900, 1950, 2000, 2050, 2100, 2150, 2200, 2250, 2300, 2350, 2400, 2450, 2500 consecutive nucleotides in length, the consecutive nucleotides being of any one of the nucleic acid sequences given in Table J of the Examples section, or of a nucleic acid encoding an orthologue or paralogue of any one of the amino acid sequences given in Table J of the Examples section. Most preferably the portion is a portion of the nucleic acid of SEQ ID NO: 384. Preferably, the portion encodes a fragment of an amino acid sequence which, when used in the construction of a phylogenetic tree, such as the one depicted in FIG. 17 (Jain et al., FEBS Journal 275, 2845-2861, 2008), clusters within subfamily IV of the HD-ZIP polypeptides, comprising the amino acid sequence represented by SEQ ID NO: 385 (represented as Os08g19590), rather than with any other group, and/or comprises any one or more of motifs 16 to 18, and/or has DNA binding activity, and/or has preferably at least 20% sequence identity to SEQ ID NO: 385.

[0491] Another nucleic acid variant useful in the methods of the invention is a nucleic acid capable of hybridising, under reduced stringency conditions, preferably under stringent conditions, with a nucleic acid encoding an HD8-like polypeptide as defined herein, or with a portion as defined herein.

[0492] According to the present invention, there is provided a method for enhancing yield-related traits in plants, comprising introducing and expressing in a plant a nucleic acid capable of hybridizing to any one of the nucleic acids given in Table J of the Examples section, or comprising introducing and expressing in a plant a nucleic acid capable of hybridising to a nucleic acid encoding an orthologue, paralogue or homologue of any of the nucleic acid sequences given in Table J of the Examples section.

[0493] Hybridising sequences useful in the methods of the invention encode an HD8-like polypeptide as defined herein, having substantially the same biological activity as the amino acid sequences given in Table J of the Examples section. Preferably, the hybridising sequence is capable of hybridising to the complement of any one of the nucleic acids given in Table J of the Examples section, or to a portion of any of these sequences, a portion being as defined above, or the hybridising sequence is capable of hybridising to the complement of a nucleic acid encoding an orthologue or paralogue of any one of the amino acid sequences given in Table J of the Examples section. Most preferably, the hybridising sequence is capable of hybridising to the complement of a nucleic acid as represented by SEQ ID NO: 384 or to a portion thereof.

[0494] Preferably, the hybridising sequence encodes a polypeptide with an amino acid sequence which, when full-length and used in the construction of a phylogenetic tree, such as the one depicted in FIG. 17 (Jain et al., FEBS Journal 275, 2845-2861, 2008), clusters within subfamily IV of the HD-ZIP polypeptides, comprising the amino acid sequence represented by SEQ ID NO: 385 (represented as Os08g19590), rather than with any other group, and/or comprises any one or more of motifs 16 to 18, and/or has DNA binding activity, and/or has preferably at least 20% sequence identity to SEQ ID NO: 385.

[0495] Another nucleic acid variant useful in the methods of the invention is a splice variant encoding an HD8-like polypeptide as defined hereinabove, a splice variant being as defined herein.

[0496] According to the present invention, there is provided a method for enhancing yield-related traits in plants, comprising introducing and expressing in a plant a splice variant of any one of the nucleic acid sequences given in Table J of the Examples section, or a splice variant of a nucleic acid encoding an orthologue, paralogue or homologue of any of the amino acid sequences given in Table J of the Examples section.

[0497] Preferred splice variants are splice variants of a nucleic acid represented by SEQ ID NO: 384, or a splice variant of a nucleic acid encoding an orthologue or paralogue of SEQ ID NO: 385. Preferably, the amino acid sequence encoded by the splice variant, when used in the construction of a phylogenetic tree, such as the one depicted in FIG. 17 (Jain et al., FEBS Journal 275, 2845-2861, 2008), clusters within subfamily IV of the HD-ZIP polypeptides, comprising the amino acid sequence represented by SEQ ID NO: 385 (represented as Os08g19590), rather than with any other group, and/or comprises any one or more of motifs 16 to 18, and/or has DNA binding activity, and/or has preferably at least 20% sequence identity to SEQ ID NO: 385.

[0498] Another nucleic acid variant useful in performing the methods of the invention is an allelic variant of a nucleic acid encoding an HD8-like polypeptide as defined hereinabove, an allelic variant being as defined herein.

[0499] According to the present invention, there is provided a method for enhancing yield-related traits in plants, comprising introducing and expressing in a plant an allelic variant of any one of the nucleic acids given in Table J of the Examples section, or comprising introducing and expressing in a plant an allelic variant of a nucleic acid encoding an orthologue, paralogue or homologue of any of the amino acid sequences given in Table J of the Examples section.

[0500] The polypeptides encoded by allelic variants useful in the methods of the present invention have substantially the same biological activity as the HD8-like polypeptide of SEQ ID NO: 385 and any of the amino acids depicted in Table J of the Examples section. Allelic variants exist in nature, and encompassed within the methods of the present invention is the use of these natural alleles. Preferably, the allelic variant is an allelic variant of SEQ ID NO: 384 or an allelic variant of a nucleic acid encoding an orthologue or paralogue of SEQ ID NO: 385. Preferably, the amino acid sequence encoded by the allelic variant, when used in the construction of a phylogenetic tree, such as the one depicted in FIG. 17 (Jain et al., FEBS Journal 275, 2845-2861, 2008), clusters within subfamily IV of the HD-ZIP polypeptides, comprising the amino acid sequence represented by SEQ ID NO: 385 (represented as Os08g19590), rather than with any other group, and/or comprises any one or more of motifs 16 to 18, and/or has DNA binding activity, and/or has preferably at least 20% sequence identity to SEQ ID NO: 385.

[0501] Gene shuffling or directed evolution may also be used to generate variants of nucleic acids encoding HD8-like polypeptides as defined above; the term “gene shuffling” being as defined herein.

[0502] According to the present invention, there is provided a method for enhancing yield-related traits in plants, comprising introducing and expressing in a plant a variant of any one of the nucleic acid sequences given in Table J of the Examples section, or comprising introducing and expressing in a plant a variant of a nucleic acid encoding an orthologue, paralogue or homologue of any of the amino acid sequences given in Table J of the Examples section, which variant nucleic acid is obtained by gene shuffling.

[0503] Preferably, the amino acid sequence encoded by the variant nucleic acid obtained by gene shuffling, when used in the construction of a phylogenetic tree such as the one depicted in FIG. 17 (Jain et al., FEBS Journal 275, 2845-2861, 2008), clusters within subfamily IV of the HD-ZIP polypeptides, comprising the amino acid sequence represented by SEQ ID NO: 385 (represented as Os08g19590), rather than with any other group, and/or comprises any one or more of motifs 16 to 18, and/or has DNA binding activity, and/or has preferably at least 20% sequence identity to SEQ ID NO: 385.

[0504] Furthermore, nucleic acid variants may also be obtained by site-directed mutagenesis. Several methods are available to achieve site-directed mutagenesis, the most common being PCR based methods (Current Protocols in Molecular Biology. Wiley Eds.).

[0505] Nucleic acids encoding HD8-like polypeptides may be derived from any natural or artificial source. The nucleic acid may be modified from its native form in composition and/or genomic environment through deliberate human manipulation. Preferably the HD8-like polypeptide-encoding nucleic acid is from a plant, further preferably from a monocotyledonous plant, more preferably from the family Poaceae, most preferably the nucleic acid is from Oryza sativa.

[0506] Performance of the methods of the invention gives plants having enhanced yield-related traits. In particular performance of the methods of the invention gives plants having increased yield, especially increased seed yield relative to control plants. The terms “yield” and “seed yield” are described in more detail in the “definitions” section herein.

[0507] Reference herein to enhanced yield-related traits is taken to mean an increase early vigour and/or in biomass (weight) of one or more parts of a plant, which may include (i) aboveground parts and preferably aboveground harvestable parts and/or (ii) parts below ground and preferably harvestable below ground. In particular, such harvestable parts are seeds, and performance of the methods of the invention results in plants having increased seed yield relative to the seed yield of control plants.

[0508] The present invention provides a method for increasing yield, especially seed yield of plants, relative to control plants, which method comprises modulating expression in a plant of a nucleic acid encoding an HD8-like polypeptide as defined herein.

[0509] According to a preferred feature of the present invention, performance of the methods of the invention gives plants having an increased growth rate relative to control plants. Therefore, according to the present invention, there is provided a method for increasing the growth rate of plants, which method comprises modulating expression in a plant of a nucleic acid encoding an HD8-like polypeptide as defined herein.

[0510] Performance of the methods of the invention gives plants grown under non-stress conditions or under mild drought conditions increased yield relative to control plants grown under comparable conditions. Therefore, according to the present invention, there is provided a method for increasing yield in plants grown under non-stress conditions or under mild drought conditions, which method comprises modulating expression in a plant of a nucleic acid encoding an HD8-like polypeptide.

[0511] Performance of the methods of the invention gives plants grown under conditions of nutrient deficiency, particularly under conditions of nitrogen deficiency, increased yield relative to control plants grown under comparable conditions. Therefore, according to the present invention, there is provided a method for increasing yield in plants grown under conditions of nutrient deficiency, which method comprises modulating expression in a plant of a nucleic acid encoding an HD8-like polypeptide.

[0512] Performance of the methods of the invention gives plants grown under conditions of salt stress, increased yield relative to control plants grown under comparable conditions. Therefore, according to the present invention, there is provided a method for increasing yield in plants grown under conditions of salt stress, which method comprises modulating expression in a plant of a nucleic acid encoding an HD8-like polypeptide.

[0513] Performance of the methods of the invention gives plants grown under conditions of drought stress, increased yield relative to control plants grown under comparable conditions. Therefore, according to the present invention, there is provided a method for increasing yield in plants grown under conditions of drought stress, which method comprises modulating expression in a plant of a nucleic acid encoding an HD8-like polypeptide.

[0514] The invention also provides genetic constructs and vectors to facilitate introduction and/or expression in plants of nucleic acids encoding HD8-like polypeptides. The gene constructs may be inserted into vectors, which may be commercially available, suitable for transforming into plants and suitable for expression of the gene of interest in the transformed cells. The invention also provides use of a gene construct as defined herein in the methods of the invention.

[0515] More specifically, the present invention provides a construct comprising:
[0516] (a) a nucleic acid encoding an HD8-like polypeptide as defined above;
[0517] (b) one or more control sequences capable of driving expression of the nucleic acid sequence of (a); and optionally
[0518] (c) a transcription termination sequence.

[0519] Preferably, the nucleic acid encoding an HD8-like polypeptide is as defined above. The term “control sequence” and “termination sequence” are as defined herein.

[0520] The invention furthermore provides plants transformed with a construct as described above. In particular, the invention provides plants transformed with a construct as described above, which plants have increased yield-related traits as described herein.

[0521] Plants are transformed with a vector comprising any of the nucleic acids described above. The skilled artisan is well aware of the genetic elements that must be present on the vector in order to successfully transform, select and propagate host cells containing the sequence of interest. The sequence of interest is operably linked to one or more control sequences (at least to a promoter).

[0522] Advantageously, any type of promoter, whether natural or synthetic, may be used to drive expression of the nucleic acid sequence, but preferably the promoter is of plant origin. A root-specific promoter is particularly useful in the methods. See the “Definitions” section herein for definitions of the various promoter types.

[0523] It should be clear that the applicability of the present invention is not restricted to the HD8-like polypeptide-encoding nucleic acid represented by SEQ ID NO: 384, nor is the applicability of the invention restricted to expression of an HD8-like polypeptide-encoding nucleic acid when driven by a root-specific promoter.

[0524] The root-specific promoter is preferably an RCc3 promoter (Plant Mol. Biol. 1995 January; 27(2):237-48) or a promoter of substantially the same strength and having substantially the same expression pattern (a functionally equivalent promoter), more preferably the RCc3 promoter is from rice, further preferably the RCc3 promoter is represented by a nucleic acid sequence substantially similar to SEQ ID NO: 565, most preferably the promoter is as represented by SEQ ID NO: 565. Examples of other root-specific promoters which may also be used to perform the methods of the invention are shown in Table 2b in the “Definitions” section above.

[0525] Optionally, one or more terminator sequences may be used in the construct introduced into a plant. Preferably, the construct comprises an expression cassette comprising a RCc3 promoter, substantially similar to SEQ ID NO: 565, operably linked to the nucleic acid encoding the HD8-like polypeptide. More preferably, the construct comprises a zein terminator (t-zein) linked to the 3′ end of the HAB1 coding sequence. Most preferably, the expression cassette comprises the sequence represented by SEQ ID NO: 566 (pRCc3::HD8-like::t-zein sequence). Furthermore, one or more sequences encoding selectable markers may be present on the construct introduced into a plant.

[0526] According to a preferred feature of the invention, the modulated expression is increased expression. Methods for increasing expression of nucleic acids or genes, or gene products, are well documented in the art and examples are provided in the definitions section.

[0527] As mentioned above, a preferred method for modulating expression of a nucleic acid encoding an HD8-like polypeptide is by introducing and expressing in a plant a nucleic acid encoding an HD8-like polypeptide; however the effects of performing the method, i.e. enhancing yield-related traits may also be achieved using other well known techniques, including but not limited to T-DNA activation tagging, TILLING, homologous recombination. A description of these techniques is provided in the definitions section.

[0528] The invention also provides a method for the production of transgenic plants having enhanced yield-related traits relative to control plants, comprising introduction and expression in a plant of any nucleic acid encoding an HD8-like polypeptide as defined hereinabove.

[0529] More specifically, the present invention provides a method for the production of transgenic plants having enhanced yield-related traits, particularly increased seed yield, which method comprises:
[0530] (i) introducing and expressing in a plant or plant cell an HD8-like polypeptide-encoding nucleic acid or a genetic construct comprising an HD8-like polypeptide-encoding nucleic acid; and
[0531] (ii) cultivating the plant cell under conditions promoting plant growth and development.

[0532] Cultivating the plant cell under conditions promoting plant growth and development, may or may not include regeneration and or growth to maturity.

[0533] The nucleic acid of (i) may be any of the nucleic acids capable of encoding an HD8-like polypeptide as defined herein.

[0534] The nucleic acid may be introduced directly into a plant cell or into the plant itself (including introduction into a tissue, organ or any other part of a plant). According to a preferred feature of the present invention, the nucleic acid is preferably introduced into a plant by transformation. The term “transformation” is described in more detail in the “definitions” section herein.

[0535] The present invention clearly extends to any plant cell or plant produced by any of the methods described herein, and to all plant parts and propagules thereof. The present invention encompasses plants or parts thereof (including seeds) obtainable by the methods according to the present invention. The plants or parts thereof comprise a nucleic acid transgene encoding an HD8-like polypeptide as defined above. The present invention extends further to encompass the progeny of a primary transformed or transfected cell, tissue, organ or whole plant that has been produced by any of the aforementioned methods, the only requirement being that progeny exhibit the same genotypic and/or phenotypic characteristic(s) as those produced by the parent in the methods according to the invention.

[0536] The invention also includes host cells containing an isolated nucleic acid encoding an HD8-like polypeptide as defined hereinabove. Preferred host cells according to the invention are bacterial, yeast, fungal or plant cells. Host plants for the nucleic acids or the vector used in the method according to the invention, the expression cassette or construct or vector are, in principle, advantageously all plants, which are capable of synthesizing the polypeptides used in the inventive method.

[0537] The methods of the invention are advantageously applicable to any plant, in particular to any plant as defined herein. Plants that are particularly useful in the methods of the invention include all plants which belong to the superfamily Viridiplantae, in particular monocotyledonous and dicotyledonous plants including fodder or forage legumes, ornamental plants, food crops, trees or shrubs.

[0538] According to an embodiment of the present invention, the plant is a crop plant. Examples of crop plants include but are not limited to chicory, carrot, cassava, trefoil, soybean, beet, sugar beet, sunflower, canola, alfalfa, rapeseed, linseed, cotton, tomato, potato and tobacco.

[0539] According to another embodiment of the present invention, the plant is a monocotyledonous plant. Examples of monocotyledonous plants include sugarcane.

[0540] According to another embodiment of the present invention, the plant is a cereal. Examples of cereals include rice, maize, wheat, barley, millet, rye, triticale, sorghum, emmer, spelt, secale, einkorn, teff, milo and oats.

[0541] The invention also extends to harvestable parts of a plant such as, but not limited to seeds, leaves, fruits, flowers, stems, roots, rhizomes, tubers and bulbs, which harvestable parts comprise a recombinant nucleic acid encoding an HD8-like polypeptide. The invention furthermore relates to products derived, preferably directly derived, from a harvestable part of such a plant, such as dry pellets or powders, oil, fat and fatty acids, starch or proteins.

[0542] The present invention also encompasses use of nucleic acids encoding HD8-like polypeptides as described herein and use of these HD8-like polypeptides in enhancing any of the aforementioned yield-related traits in plants. For example, nucleic acids encoding HD8-like polypeptide described herein, or the HD8-like polypeptides themselves, may find use in breeding programmes in which a DNA marker is identified which may be genetically linked to an HD8-like polypeptide-encoding gene. The nucleic acids/genes, or the HD8-like polypeptides themselves may be used to define a molecular marker. This DNA or protein marker may then be used in breeding programmes to select plants having enhanced yield-related traits as defined hereinabove in the methods of the invention. Furthermore, allelic variants of an HD8-like polypeptide-encoding nucleic acid/gene may find use in marker-assisted breeding programmes. Nucleic acids encoding HD8-like polypeptides may also be used as probes for genetically and physically mapping the genes that they are a part of, and as markers for traits linked to those genes. Such information may be useful in plant breeding in order to develop lines with desired phenotypes.

[0543] Embodiments LEJ1 Polypeptide
[0544] 1. A method for enhancing yield-related traits in plants relative to control plants, comprising modulating expression in a plant of a nucleic acid encoding an LEJ1 polypeptide, wherein said LEJ1 polypeptide comprises at least one, preferably two CBS domain(s) (SMART entry SM00116).
[0545] 2. Method according to embodiment 1, wherein said modulated expression is effected by introducing and expressing in a plant said nucleic acid encoding said LEJ1 polypeptide.
[0546] 3. Method according to embodiment 1 or 2, wherein said enhanced yield-related traits comprise increased yield relative to control plants, and preferably comprise increased biomass and/or increased seed yield relative to control plants.
[0547] 4. Method according to any one of embodiments 1 to 3, wherein said enhanced yield-related traits are obtained under non-stress conditions.
[0548] 5. Method according to any one of embodiments 1 to 3, wherein said enhanced yield-related traits are obtained under conditions of drought stress, salt stress or nitrogen deficiency.
[0549] 6. Method according to any of embodiments 1 to 5, wherein said LEJ1 polypeptide comprises one or more of motifs 1 to 6 (SEQ ID NO: 205 to SEQ ID NO: 210).
[0550] 7. Method according to any one of embodiments 1 to 6, wherein said nucleic acid encoding an LEJ1 is of plant origin, preferably from a dicotyledonous plant, further preferably from the family Brassicaceae, more preferably from the genus Arabidopsis, most preferably from Arabidopsis thaliana.
[0551] 8. Method according to any one of embodiments 1 to 7, wherein said nucleic acid encoding an LEJ1 encodes any one of the polypeptides listed in Table A1 or is a portion of such a nucleic acid, or a nucleic acid capable of hybridising with such a nucleic acid.
[0552] 9. Method according to any one of embodiments 1 to 7, wherein said nucleic acid sequence encodes an orthologue or paralogue of any of the polypeptides given in Table A1.
[0553] 10. Method according to any one of embodiments 1 to 7, wherein said nucleic acid encoding said an LEJ1 polypeptide corresponds to SEQ ID NO: 2.
[0554] 11. Method according to any one of embodiments 1 to 10, wherein said nucleic acid is operably linked to a constitutive promoter, preferably to a medium strength constitutive promoter, preferably to a plant promoter, more preferably to a GOS2 promoter, most preferably to a GOS2 promoter from rice.
[0555] 12. Plant, plant part thereof, including seeds, or plant cell, obtainable by a method according to any one of embodiments 1 to 11, wherein said plant, plant part or plant cell comprises a recombinant nucleic acid encoding an LEJ1 polypeptide as defined in any of embodiments 1 and 6 to 10.
[0556] 13. Construct comprising:
   [0557] (i) nucleic acid encoding an LEJ1 as defined in any of embodiments 1 and 6 to 10;
   [0558] (ii) one or more control sequences capable of driving expression of the nucleic acid sequence of (i); and optionally
   [0559] (iii) a transcription termination sequence.
[0560] 14. Construct according to embodiment 13, wherein one of said control sequences is a constitutive promoter, preferably a medium strength constitutive promoter, preferably to a plant promoter, more preferably a GOS2 promoter, most preferably a GOS2 promoter from rice.
[0561] 15. Use of a construct according to embodiment 13 or 14 in a method for making plants having enhanced yield-related traits, preferably increased yield relative to control plants, and more preferably increased seed yield and/or increased biomass relative to control plants.
[0562] 16. Plant, plant part or plant cell transformed with a construct according to embodiment 13 or 14.
[0563] 17. Method for the production of a transgenic plant having enhanced yield-related traits relative to control plants, preferably increased yield relative to control plants, and more preferably increased seed yield and/or increased biomass relative to control plants, comprising:
   [0564] (i) introducing and expressing in a plant cell or plant a nucleic acid encoding an LEJ1 polypeptide as defined in any of embodiments 1 and 6 to 10; and
   [0565] (ii) cultivating said plant cell or plant under conditions promoting plant growth and development.
[0566] 18. Transgenic plant having enhanced yield-related traits relative to control plants, preferably increased yield relative to control plants, and more preferably increased seed yield and/or increased biomass, resulting from modulated expression of a nucleic acid encoding an LEJ1 polypeptide as defined in any of embodiments 1 and 6 to 10 or a transgenic plant cell derived from said transgenic plant.
[0567] 19. Transgenic plant according to embodiment 12, 16 or 18, or a transgenic plant cell derived therefrom, wherein said plant is a crop plant, such as beet, sugarbeet or alfalfa; or a monocotyledonous plant such as sugarcane; or a cereal, such as rice, maize, wheat, barley, millet, rye, triticale, sorghum, emmer, spelt, secale, einkorn, teff, milo or oats.
[0568] 20. Harvestable parts of a plant according to embodiment 19, wherein said harvestable parts are preferably shoot biomass and/or seeds.
[0569] 21. Products derived from a plant according to embodiment 19 and/or from harvestable parts of a plant according to embodiment 20.
[0570] 22. Use of a nucleic acid encoding an LEJ1 polypeptide as defined in any of embodiments 1 and 6 to 10 for enhancing yield-related traits in plants relative to control plants, preferably for increasing yield, and more preferably for increasing seed yield and/or for increasing biomass in plants relative to control plants.

[0571] Embodiments ExbB Polypeptide
[0572] 1. A method for enhancing yield-related traits in plants relative to control plants, comprising modulating expression in a plant of a nucleic acid encoding an ExbB polypeptide, wherein said ExbB polypeptide comprises an InterPro accession IPR002898MotA/TolQ/ExbB proton channel domain, corresponding to PFAM accession number PF01618 MotA_ExbB domain.
[0573] 2. Method according to embodiment 1, wherein said ExbB polypeptide comprises at least one additional transmembrane domain.
[0574] 3. Method according to embodiment 1 or 2, wherein said modulated expression is effected by introducing and expressing in a plant a nucleic acid encoding an ExbB polypeptide.
[0575] 4. Method according to any one of embodiments 1 to 3, wherein said nucleic acid encoding an ExbB polypeptide encodes any one of the proteins listed in Table A2 or is a portion of such a nucleic acid, or a nucleic acid capable of hybridising with such a nucleic acid.
[0576] 5. Method according to any one of embodiments 1 to 4, wherein said nucleic acid sequence encodes an orthologue or paralogue of any of the proteins given in Table A2.
[0577] 6. Method according to any preceding embodiment, wherein said enhanced yield-related traits comprise increased yield, preferably increased seed yield relative to control plants.
[0578] 7. Method according to any one of embodiments 1 to 6, wherein said enhanced yield-related traits are obtained under non-stress conditions.
[0579] 8. Method according to any one of embodiments 1 to 6, wherein said enhanced yield-related traits are obtained under conditions of drought stress, salt stress or nitrogen deficiency.
[0580] 9. Method according to any one of embodiments 3 to 8, wherein said nucleic acid is operably linked to a constitutive promoter, preferably to a GOS2 promoter, most preferably to a GOS2 promoter from rice.
[0581] 10. Method according to any one of embodiments 1 to 9, wherein said nucleic acid encoding an ExbB polypeptide is of cyanobacterial origin, preferably from Synechocystis species, more preferably from Synechocystis sp. PCC 6803.
[0582] 11. Plant or part thereof, including seeds, obtainable by a method according to any one of embodiments 1 to 10, wherein said plant or part thereof comprises a recombinant nucleic acid encoding an ExbB polypeptide.
[0583] 12. Construct comprising:
   [0584] (i) nucleic acid encoding an ExbB polypeptide as defined in embodiments 1 or 2;
   [0585] (ii) one or more control sequences capable of driving expression of the nucleic acid sequence of (i); and optionally
   [0586] (iii) a transcription termination sequence.
[0587] 13. Construct according to embodiment 12, wherein one of said control sequences is a constitutive promoter, preferably a GOS2 promoter, most preferably a GOS2 promoter from rice.
[0588] 14. Construct according to embodiment 12, wherein one of said control sequences is a root specific promoter, preferably a rice root specific promoter.
[0589] 15. Use of a construct according to embodiment 12, 13 or 14 in a method for making plants having increased yield, particularly increased biomass and/or increased seed yield relative to control plants.
[0590] 16. Plant, plant part or plant cell transformed with a construct according to embodiment 12, 13 or 14.
[0591] 17. Method for the production of a transgenic plant having increased yield, particularly increased biomass and/or increased seed yield relative to control plants, comprising:
   [0592] (i) introducing and expressing in a plant a nucleic acid encoding an ExbB polypeptide as defined in embodiment 1 or 2; and
   [0593] (ii) cultivating the plant cell under conditions promoting plant growth and development.
[0594] 18. Transgenic plant having increased yield, particularly increased biomass and/or increased seed yield, relative to control plants, resulting from modulated expression of a nucleic acid encoding an ExbB polypeptide as defined in embodiment 1 or 2, or a transgenic plant cell derived from said transgenic plant.
[0595] 19. Transgenic plant according to embodiment 11, 16 or 18, or a transgenic plant cell derived thereof, wherein said plant is a crop plant, such as beet, sugarbeet or alfalfa, or a monocot such as sugarcane, or a cereal, such as rice, maize, wheat, barley, millet, rye, triticale, sorghum emmer, spelt, secale, einkorn, teff, milo and oats.
[0596] 20. Harvestable parts of a plant according to embodiment 19, wherein said harvestable parts are preferably shoot biomass and/or seeds.
[0597] 21. Products derived from a plant according to embodiment 19 and/or from harvestable parts of a plant according to embodiment 20.
[0598] 22. Use of a nucleic acid encoding an ExbB polypeptide in increasing yield, particularly in increasing seed yield and/or shoot biomass in plants, relative to control plants.

[0599] Embodiments NMPRT Polypeptide
[0600] 1. A method for enhancing yield-related traits in plants relative to control plants, comprising modulating expression in a plant of a nucleic acid encoding a nicotinamide phosphoribosyltransferase (NMPRT), wherein said NMPRT is of non-vertebrate origin and comprises
   [0601] (i) a domain with an InterPro accession IPR016471, and
   [0602] (ii) at least 50% amino acid sequence identity, and preferably in increasing order of 61%, 62%, 63%, 64%, 65%, 66%, 67%, 68%, 69%, 70%, 71%, 72%, 73%, 74%, 75%, 76%, 77%, 78%, 79%, 80%, 81%, 82%, 83%, 84%, 85%, 86%, 87%, 88%, 89%, 90%, 91%, 92%, 93%, 94%, 95%, 96%, 97%, 98%, or 99% or more amino acid sequence identity to a domain as represented by SEQ ID NO: 315.
[0603] 2. Method according to embodiment 1, wherein said modulated expression is effected by introducing and expressing in said plant said nucleic acid encoding said NMPRT.
[0604] 3. Method according to embodiment 1 or 2, wherein said enhanced yield-related traits comprise increased yield relative to control plants, and preferably comprise increased seed yield relative to control plants.
[0605] 4. Method according to any one of embodiments 1 to 3, wherein said enhanced yield-related traits are obtained under non-stress conditions.
[0606] 5. Method according to any one of embodiments 1 to 3, wherein said enhanced yield-related traits are obtained under conditions of drought stress, salt stress or nitrogen deficiency.
[0607] 6. Method according to any of embodiments 1 to 5, wherein said NMPRT comprises at least 64% amino acid sequence identity, and for instance at least 65%, 66%, 67%, 68%, 69%, 70%, 71%, 72%, 73%, 74%, 75%, 76%, 77%, 78%, 79%, 80%, 81%, 82%, 83%, 84%, 85%, 86%, 87%, 88%, 89%, 90%, 91%, 92%, 93%, 94%, 95%, 96%, 97%, 98%, 99% or more amino acid sequence identity to one or more of the following motifs:

(i) Motif 7:
(SEQ ID NO: 318)
FKLHDFGARGVSSGESSGIGGLAHLVNFQGSDTV,
(ii) Motif 8:
(SEQ ID NO: 319)
AAYSIPAAEHSTITAWG,
(iii) Motif 9:
(SEQ ID NO: 320)
AVVSDSYDL.
(iv) Motif 10:
(SEQ ID NO: 321)
VIRPDSGDP,
(v) Motif 11:
(SEQ ID NO: 322)
VRVIQGDGV,
(vi) Motif 12:
(SEQ ID NO: 323)
NLAFGMGGALLQKVNRDT.

[0608] 7. Method according to any one of embodiments 1 to 6, wherein said nucleic acid encoding a NMPRT is of prokaryotic origin, preferably from cyanobacterial origin, more preferably from the genus Synechocystis, most preferably from a Synechocystis species.
[0609] 8. Method according to any one of embodiments 1 to 7, wherein said nucleic acid encoding a NMPRT encodes any one of the polypeptides listed in Table A3 or is a portion of such a nucleic acid, or a nucleic acid capable of hybridising, preferably under high stringency conditions, with such a nucleic acid.
[0610] 9. Method according to any one of embodiments 1 to 8, wherein said nucleic acid sequence encodes an orthologue or paralogue of any of the polypeptides given in Table A3.
[0611] 10. Method according to any one of embodiments 1 to 9, wherein said nucleic acid encoding said NMPRT is represented by SEQ ID NO: 281 or is represented by SEQ ID NO: 309.
[0612] 11. Method according to any one of embodiments 1 to 10, wherein said nucleic acid is operably linked to a constitutive promoter, preferably to a medium strength constitutive promoter, preferably to a plant promoter, more preferably to a GOS2 promoter, most preferably to a GOS2 promoter from rice.
[0613] 12. Plant, plant part thereof, including seeds, or plant cell, obtainable by a method according to any one of embodiments 1 to 11, wherein said plant, plant part or plant cell comprises a recombinant nucleic acid encoding a NMPRT polypeptide as defined in any of embodiments 1 and 6 to 10.
[0614] 13. Construct comprising:
   [0615] (i) nucleic acid encoding a NMPRT as defined in any of embodiments 1 and 6 to 10;
   [0616] (ii) one or more control sequences capable of driving expression of the nucleic acid sequence of (i); and optionally
   [0617] (iii) a transcription termination sequence.
[0618] 14. Construct according to embodiment 13, wherein one of said control sequences is a constitutive promoter, preferably a medium strength constitutive promoter, preferably to a plant promoter, more preferably a GOS2 promoter, most preferably a GOS2 promoter from rice.
[0619] 15. Use of a construct according to embodiment 13 or 14 in a method for making plants having enhanced yield-related traits, preferably increased yield relative to control plants, and more preferably increased seed yield relative to control plants.
[0620] 16. Plant, plant part or plant cell transformed with a construct according to embodiment 13 or 14.
[0621] 17. Method for the production of a transgenic plant having enhanced yield-related traits relative to control plants, preferably increased yield relative to control plants, and more preferably increased seed yield relative to control plants, comprising:
   [0622] (i) introducing and expressing in a plant cell or plant a nucleic acid encoding a NMPRT as defined in any of embodiments 1 and 6 to 10; and
   [0623] (ii) cultivating said plant cell or plant under conditions promoting plant growth and development.
[0624] 18. Transgenic plant having enhanced yield-related traits relative to control plants, preferably increased yield relative to control plants, and more preferably increased seed yield, resulting from modulated expression of a nucleic acid encoding a NMPRT polypeptide as defined in any of embodiments 1 and 6 to 10, or a transgenic plant cell derived from said transgenic plant.
[0625] 19. Transgenic plant according to embodiment 12, 16 or 18, or a transgenic plant cell derived therefrom, wherein said plant is a crop plant, such as beet, sugarbeet or alfalfa; or a monocotyledonous plant such as sugarcane; or a cereal, such as rice, maize, wheat, barley, millet, rye, triticale, sorghum, emmer, spelt, secale, einkorn, teff, milo or oats.
[0626] 20. Harvestable parts of a plant according to embodiment 19, wherein said harvestable parts are preferably shoot biomass and/or seeds.
[0627] 21. Products derived from a plant according to embodiment 19 and/or from harvestable parts of a plant according to embodiment 20.
[0628] 22. Use of a nucleic acid encoding a NMPRT polypeptide as defined in any of embodiments 1 and 6 to 10 for enhancing yield-related traits in plants relative to control plants, preferably for increasing yield, and more preferably for increasing seed yield in plants relative to control plants.

[0629] Embodiments for AP2-26-Like Polypeptide
[0630] 1. A method for enhancing yield-related traits in plants relative to control plants, comprising modulating expression in a plant of a nucleic acid encoding an AP2-26-like polypeptide, wherein said AP2-26-like polypeptide comprises a Pfam PF00847 domain.
[0631] 2. Method according to embodiment 1, wherein said modulated expression is effected by introducing and expressing in a plant said nucleic acid encoding said AP2-26-like polypeptide.
[0632] 3. Method according to embodiment 1 or 2, wherein said enhanced yield-related traits comprise increased yield and/or early vigour relative to control plants, and preferably comprise in-creased seed yield relative to control plants.
[0633] 4. Method according to any one of embodiments 1 to 3, wherein said enhanced yield-related traits are obtained under non-stress conditions.
[0634] 5. Method according to any of embodiments 1 to 4, wherein said AP2-26-like polypeptide comprises one or more of the following motifs:

(i) Motif 13:
(SEQ ID NO: 378)
KLYRGVRQRHWGKWVAEIRLP[RK]NRTRLWLGTFDTAE[ED]AAL[TA]
YD[KQ]AA[YF][RK]LR,
(ii) Motif 14:
(SEQ ID NO: 379)
[GHA][ELS][YRA][GKP]PL[DH][AS][SAT]VDAKL[QE]AIC[DQ][TSN][ILM],
(iii) Motif 15:
(SEQ ID NO: 380)
PS[YVWL]EIDW

[0635] 6. Method according to any one of embodiments 1 to 5, wherein said nucleic acid encoding an AP2-26-like is of plant origin, preferably from a dicotyledonous plant, further preferably from the family Poaceae, more preferably from the genus Oryza, most preferably from Oryza sativa.
[0636] 7. Method according to any one of embodiments 1 to 6, wherein said nucleic acid encoding an AP2-26-like encodes any one of the polypeptides listed in Table F or is a portion of such a nucleic acid, or a nucleic acid capable of hybridising with such a nucleic acid.
[0637] 8. Method according to any one of embodiments 1 to 7, wherein said nucleic acid sequence en-codes an orthologue or paralogue of any of the polypeptides given in Table F.
[0638] 9. Method according to any one of embodiments 1 to 8, wherein said nucleic acid encodes the polypeptide represented by SEQ ID NO: 329.
[0639] 10. Method according to any one of embodiments 1 to 9, wherein said nucleic acid is operably linked to a root-specific promoter, preferably to an RCc3 promoter, most preferably to the RCc3 promoter from rice.
[0640] 11. Plant, plant part thereof, including seeds, or plant cell, obtainable by a method according to any one of embodiments 1 to 10, wherein said plant, plant part or plant cell comprises a re-combinant nucleic acid encoding an AP2-26-like polypeptide as defined in any of embodiments 1 and 5 to 9
[0641] 12. Construct comprising:
   [0642] (i) nucleic acid encoding an AP2-26-like as defined in any of embodiments 1 and 5 to 9;
   [0643] (ii) one or more control sequences capable of driving expression of the nucleic acid sequence of (i); and optionally
   [0644] (i) a transcription termination sequence.
[0645] 13. Construct according to embodiment 12, wherein one of said control sequences is a root-specific promoter, preferably an RCc3 promoter, most preferably the RCc3 promoter from rice.
[0646] 14. Use of a construct according to embodiment 12 or 13 in a method for making plants having en-hanced yield-related traits, preferably increased early vigour and/or increased seed yield relative to control plants.
[0647] 15. Plant, plant part or plant cell transformed with a construct according to embodiment 12 or 13.
[0648] 16. Method for the production of a transgenic plant having enhanced yield-related traits rela-tive to control plants, preferably increased early vigour and/or increased seed yield, comprising:
   [0649] (i) introducing and expressing in a plant cell or plant a nucleic acid encoding an AP2-26-like polypeptide as defined in any of embodiments 1 and 5 to 9; and
   [0650] (ii) cultivating said plant cell or plant under conditions promoting plant growth and development.
[0651] 17. Transgenic plant having enhanced yield-related traits relative to control plants, preferably increased early vigour and/or increased seed yield, resulting from modulated expression of a nucleic acid encoding an AP2-26-like polypeptide as defined in any of embodiments 1 and 5 to 9 or a transgenic plant cell derived from said transgenic plant.
[0652] 18. Transgenic plant according to embodiment 11, 15 or 17, or a transgenic plant cell derived therefrom, wherein said plant is a crop plant, such as beet, sugarbeet or alfalfa; or a monocotyledonous plant such as sugarcane; or a cereal, such as rice, maize, wheat, barley, millet, rye, triticale, sorghum, emmer, spelt, secale, einkorn, teff, milo or oats.
[0653] 19. Harvestable parts of a plant according to embodiment 18, wherein said harvestable parts are preferably seeds.
[0654] 20. Products derived from a plant according to embodiment 18 and/or from harvestable parts of a plant according to embodiment 19.
[0655] 21. Use of a nucleic acid encoding an AP2-26-like polypeptide as defined in any of embodiments 1 and 5 to 9 for enhancing yield-related traits in plants relative to control plants, preferably for increasing early vigour and/or for increasing seed yield in plants relative to control plants.

[0656] Embodiments for HD8-Like Polypeptide
[0657] 1. A method for enhancing yield-related traits in plants relative to control plants, comprising modulating expression in a plant of a nucleic acid encoding an HD8-like polypeptide, wherein said HD8-like polypeptide comprises a homeodomain (PF00046) and a START domain (PF01852).
[0658] 2. Method according to embodiment 1, wherein said modulated expression is effected by introduc-ing and expressing in a plant said nucleic acid encoding said HD8-like polypeptide.
[0659] 3. Method according to embodiment 1 or 2, wherein said enhanced yield-related traits comprise increased yield relative to control plants, and preferably comprise increased seed yield relative to control plants.
[0660] 4. Method according to any one of embodiments 1 to 3, wherein said enhanced yield-related traits are obtained under non-stress conditions.
[0661] 5. Method according to any of embodiments 1 to 4, wherein said HD8-like polypeptide comprises one or more of the following motifs:

(i) Motif 16:
(SEQ ID NO: 562)
[EAP][TR]Q[IV]K[YF]WFQN[CR]R[ST][KQ][MI]K[KVA][FRQ][QKSH][EN
CD][RNG][AETH][DE][RN][SKNC][LAKI][LY][RQK][KRA][QE]N[EAD][EK][LI][RLK]
[KAC][TE]N[AMI][AER][LI][RKQ][NE][RQA][LMI][KR][NGK][VSMA][TI]C,
(ii) Motif 17:
(SEQ ID NO: 563)
[KPR][RK]RY[QH][LR][LH]T[MPA][QR]Q[KI][EQ][ETQR][LM][NE][RAS]
[LAYM][FD][QLK][ESA][CS][PF][NPH][FP][LD][ERLD][KNL][DLQ],
(iii) Motif 18:
(SEQ ID NO: 564)
[DN]G[CRNHY][CS][QRK][ILMV][YVIT][AW][VLIM][DEV]

[0662] 6. Method according to any one of embodiments 1 to 5, wherein said nucleic acid encoding an HD8-like is of plant origin, preferably from a monocotyledonous plant, further preferably from the family Poaceae, more preferably from the genus Oryza, most preferably from Oryza sativa.
[0663] 7. Method according to any one of embodiments 1 to 6, wherein said nucleic acid encoding an HD8-like encodes any one of the polypeptides listed in Table J or is a portion of such a nucleic acid, or a nucleic acid capable of hybridising with such a nucleic acid.
[0664] 8. Method according to any one of embodiments 1 to 7, wherein said nucleic acid sequence en-codes an orthologue or paralogue of any of the polypeptides given in Table J.
[0665] 9. Method according to any one of embodiments 1 to 8, wherein said nucleic acid encodes the polypeptide represented by SEQ ID NO: 385.
[0666] 10. Method according to any one of embodiments 1 to 9, wherein said nucleic acid is operably linked to a root-specific promoter, more preferably to a RCc3 promoter, most preferably to the RCc3 promoter from rice.
[0667] 11. Plant, plant part thereof, including seeds, or plant cell, obtainable by a method according to any one of embodiments 1 to 10, wherein said plant, plant part or plant cell comprises a recombinant nucleic acid encoding an HD8-like polypeptide as defined in any of embodiments 1 and 5 to 9
[0668] 12. Construct comprising:
   [0669] (i) nucleic acid encoding an HD8-like as defined in any of embodiments 1 and 5 to 9;
   [0670] (ii) one or more control sequences capable of driving expression of the nucleic acid sequence of (i); and optionally
   [0671] (i) a transcription termination sequence.
[0672] 13. Construct according to embodiment 12, wherein one of said control sequences is a root-specific promoter, more preferably a RCc3 promoter, most preferably the RCc3 pro-moter from rice.
[0673] 14. Use of a construct according to embodiment 12 or 13 in a method for making plants having en-hanced yield-related traits, preferably increased yield relative to control plants, and more preferably increased seed yield relative to control plants.
[0674] 15. Plant, plant part or plant cell transformed with a construct according to embodiment 12 or 13.
[0675] 16. Method for the production of a transgenic plant having enhanced yield-related traits relative to control plants, preferably increased yield relative to control plants, and more preferably increased seed yield relative to control plants, comprising:
   [0676] (i) introducing and expressing in a plant cell or plant a nucleic acid encoding an HD8-like polypeptide as defined in any of embodiments 1 and 5 to 9; and
   [0677] (ii) cultivating said plant cell or plant under conditions promoting plant growth and development.
[0678] 17. Transgenic plant having enhanced yield-related traits relative to control plants, preferably increased yield relative to control plants, and more preferably increased seed yield, resulting from modulated expression of a nucleic acid encoding an HD8-like polypeptide as defined in any of embodiments 1 and 5 to 9 or a transgenic plant cell derived from said transgenic plant.
[0679] 18. Transgenic plant according to embodiment 11, 15 or 17, or a transgenic plant cell derived therefrom, wherein said plant is a crop plant, such as beet, sugarbeet or alfalfa; or a monocotyledonous plant such as sugarcane; or a cereal, such as rice, maize, wheat, barley, millet, rye, triticale, sorghum, emmer, spelt, secale, einkorn, teff, milo or oats.
[0680] 19. Harvestable parts of a plant according to embodiment 18, wherein said harvestable parts are preferably shoot biomass and/or seeds.
[0681] 20. Products derived from a plant according to embodiment 18 and/or from harvestable parts of a plant according to embodiment 19.
[0682] 21. Use of a nucleic acid encoding an HD8-like polypeptide as defined in any of embodiments 1 and 5 to 9 for enhancing yield-related traits in plants relative to control plants, preferably for increasing yield, and more preferably for increasing seed yield in plants relative to control plants.

### DESCRIPTION OF FIGURES

[0683] The present invention will now be described with reference to the following figures in which:

[0684] FIG. 1 represents the domain structure of SEQ ID NO: 2, motifs 1 to 3 are indicated in bold, motifs 5 to 6 are shown in italics. The tandem CBS domains as identified with the SMART algorithm (see description for Table B1) are underlined.

[0685] FIG. 2 represents a multiple alignment of various LEJ1 polypeptides. The asterisks indicate identical amino acids among the various protein sequences, colons represent highly conserved amino acid substitutions, and the dots represent less conserved amino acid substitution; on other positions there is no sequence conservation. These alignments can be used for defining further motifs, when using conserved amino acids.

[0686] FIG. 3 shows phylogenetic tree of LEJ1 polypeptides.

[0687] FIG. 4 shows the MATGAT table showing the homology among the closely related LEJ1 proteins. The sequence identity is shown above the diagonal, the sequence similarity id given below the diagonal.

[0688] FIG. 5 represents the binary vector used for increased expression in Oryza sativa of an LEJ1-encoding nucleic acid under the control of a rice GOS2 promoter (pGOS2).

[0689] FIG. 6 Schematic illustration of the different components of the three ion potential coupled systems discussed: the Tol-Pal system (left); the TonB exb system (centre); and the flagellar motor (right). The black arrow indicates the polypeptide useful in performing the methods of the invention. According to Cascales et al. (Molecular Microbiology (2001), 42(3): 795-807) the TolQ-TolR proteins energize TolA and share homologies with the flagellar motor proteins MotA-MotB.

[0690] FIG. 7 represents a multiple alignment of ExbB-like polypeptides. These alignments can be used for defining further motifs, when using conserved amino acids.

[0691] FIG. 8 represents an alternative multiple alignment of ExbB-like polypeptides, using the ClustalW program. These alignments can be used for defining further motifs, when using conserved amino acids.

[0692] FIG. 9 represents a ClustalW generated neighbour-joining tree of the sequences of Table A. The tree was generated using default settings (see Example 2).

[0693] FIG. 10 represents the binary vector used for increased expression in Oryza sativa of an ExbB-encoding nucleic acid under the control of a rice GOS2 promoter (pGOS2).

[0694] FIG. 11 shows the MATGAT table showing the homology among the closely related ExbB proteins. The sequence identity is shown above the diagonal, the sequence similarity is given below the diagonal.

[0695] FIG. 12 represents the domain structure of SEQ ID NO: 282 with indication of the position of the domain with InterPro accession IPR016471 (bold), SEQ ID NO: 315 (underlined) and indication of the position of the Motifs 7 to 12.

[0696] FIG. 13 represents a multiple alignment of various NMPRT polypeptides. The asterisks indicate identical amino acids among the various protein sequences, colons represent highly conserved amino acid substitutions, and the dots represent less conserved amino acid substitution; on other positions there is no sequence conservation. These alignments can be used for defining further motifs, when using conserved amino acids.

[0697] FIG. 14 represents the binary vector used for increased expression in Oryza sativa of a NMPRT-encoding nucleic acid under the control of a rice GOS2 promoter (pGOS2).

[0698] FIG. 15 represents the domain structure of SEQ ID NO: 329 with conserved motifs 13 to 15 indicated in bold, and the AP2 domain shown in italics.

[0699] FIG. 16 represents a multiple alignment of various AP2-26-like polypeptides. The conserved regions can be readily derived from this alignment, wich is therefore useful for defining further motifs, when considering conserved amino acids. The asterisks indicate identical amino acids among the various protein sequences, colons represent highly conserved amino acid substitutions, and the dots represent less conserved amino acid substitution; on other positions there is no sequence conservation.

[0700] FIG. 17 shows phylogenetic tree of AP2-26-like polypeptides, SEQ ID NO: 329 is represented as LOC_Os08g31580.

[0701] FIG. 18 shows the MATGAT table of Example 14.

[0702] FIG. 19 represents the binary vector used for increased expression in Oryza sativa of an AP2-26-like-encoding nucleic acid under the control of a rice RCc3 promoter (pRCc3::AP2-26-like).

[0703] FIG. 20 represents the domain structure of SEQ ID NO: 385 with the homeodomain and the START domain in italics, the motifs 16 to 18 in bold.

[0704] FIG. 21 represents a multiple alignment of various HD8-like polypeptides. The asterisks indicate identical amino acids among the various protein sequences, colons represent highly conserved amino acid substitutions, and the dots represent less conserved amino acid substitution; on other positions there is no sequence conservation. These alignments can be used for defining further motifs or signature sequences, when using conserved amino acids.

[0705] FIG. 22 shows phylogenetic tree of HD8-like polypeptides (Jain et al., 2008).

[0706] FIG. 23 shows the MATGAT table of Example 25.

[0707] FIG. 24 represents the binary vector used for increased expression in Oryza sativa of a HD8-like-encoding nucleic acid under the control of a rice RCc3 promoter (pRCc3).

### EXAMPLES

[0708] The present invention will now be described with reference to the following examples, which are by way of illustration only. The following examples are not intended to limit the scope of the invention.

[0709] DNA manipulation: unless otherwise stated, recombinant DNA techniques are performed according to standard protocols described in (Sambrook (2001) Molecular Cloning: a laboratory manual, 3rd Edition Cold Spring Harbor Laboratory Press, CSH, New York) or in Volumes 1 and 2 of Ausubel et al. (1994), Current Protocols in Molecular Biology, Current Protocols. Standard materials and methods for plant molecular work are described in Plant Molecular Biology Labfax (1993) by R. D. D. Croy, published by BIOS Scientific Publications Ltd (UK) and Blackwell Scientific Publications (UK).

### Example 1

### Identification of Sequences Related to the Nucleic Acid Sequence Used in the Methods of the Invention

[0710] 1. Loss of Timing of ET and JA Biosynthesis 1 (LEJ1) Polypeptides

[0711] Sequences (full length cDNA, ESTs or genomic) related to SEQ ID NO: 1 and SEQ ID NO: 2 were identified amongst those maintained in the Entrez Nucleotides database at the National Center for Biotechnology Information (NCBI) using database sequence search tools, such as the Basic Local Alignment Tool (BLAST) (Altschul et al. (1990) J. Mol. Biol. 215:403-410; and Altschul et al. (1997) Nucleic Acids Res. 25:3389-3402). The program is used to find regions of local similarity between sequences by comparing nucleic acid or polypeptide sequences to sequence databases and by calculating the statistical significance of matches. For example, the polypeptide encoded by the nucleic acid of SEQ ID NO: 1 was used for the TBLASTN algorithm, with default settings and the filter to ignore low complexity sequences set off. The output of the analysis was viewed by pairwise comparison, and ranked according to the probability score (E-value), where the score reflect the probability that a particular alignment occurs by chance (the lower the E-value, the more significant the hit). In addition to E-values, comparisons were also scored by percentage identity. Percentage identity refers to the number of identical nucleotides (or amino acids) between the two compared nucleic acid (or polypeptide) sequences over a particular length. In some instances, the default parameters may be adjusted to modify the stringency of the search. For example the E-value may be increased to show less stringent matches. This way, short nearly exact matches may be identified.

[0712] Table A1 provides a list of nucleic acid sequences related to SEQ ID NO: 1 and SEQ ID NO: 2.

TABLE A1
Examples of LEJ1 nucleic acids and polypeptides:

| | Nucleic | Polypep- |
|---|---|---|
| | acid | tide |
| | SEQ ID | SEQ ID |
| Name | NO: | NO: |
| A. thaliana_AT4G34120.1#1 | 1 | 2 |
| A. lyrata_491262#1 | 3 | 4 |
| B. napus_TC96197#1 | 5 | 6 |
| B. oleracea_TA10145_3712#1 | 7 | 8 |
| B. oleracea_TA9314_3712#1 | 9 | 10 |
| B. rapa_DN962218#1 | 11 | 12 |
| B. rapa_DN964415#1 | 13 | 14 |
| A. lyrata_490898#1 | 15 | 16 |
| A. thaliana_AT4G36910.1#1 | 17 | 18 |
| Aquilegia_sp_TC20070#1 | 19 | 20 |
| Aquilegia_sp_TC26534#1 | 21 | 22 |
| B. distachyon_TA1216_15368#1 | 23 | 24 |
| B. napus_TC64871#1 | 25 | 26 |
| Bruguiera_gymnorhiza_AB429351#1 | 27 | 28 |
| C. annuum_TC14856#1 | 29 | 30 |
| C. annuum_TC16585#1 | 31 | 32 |
| C. clementina_TC16065#1 | 33 | 34 |
| C. clementina_TC36326#1 | 35 | 36 |
| C. endivia_EL357072#1 | 37 | 38 |
| C. intybus_EH692144#1 | 39 | 40 |
| C. intybus_TA750_13427#1 | 41 | 42 |
| C. reinhardtii_185012#1 | 43 | 44 |
| C. sinensis_EY677132#1 | 45 | 46 |
| C. sinensis_TC7973#1 | 47 | 48 |
| C. solstitialis_EH757631#1 | 49 | 50 |
| C. solstitialis_TA2067_347529#1 | 51 | 52 |
| C. solstitialis_TA5231_347529#1 | 53 | 54 |
| C. vulgaris_68484#1 | 55 | 56 |
| E. esula_TC5314#1 | 57 | 58 |
| G. hirsutum_EV497842#1 | 59 | 60 |
| G. hirsutum_TC130207#1 | 61 | 62 |
| G. hirsutum_TC131625#1 | 63 | 64 |
| G. hirsutum_TC132155#1 | 65 | 66 |
| G. max_Glyma01g39530.1#1 | 67 | 68 |
| G. max_Glyma01g39530.2#1 | 69 | 70 |
| G. max_Glyma11g05710.1#1 | 71 | 72 |
| G. max_TC285505#1 | 73 | 74 |
| G. max_TC286772#1 | 75 | 76 |
| G. max_TC287707#1 | 77 | 78 |
| G. soja_CA782722#1 | 79 | 80 |
| H. ciliaris_EL432844#1 | 81 | 82 |
| H. exilis_EE655546#1 | 83 | 84 |
| H. petiolaris_DY938300#1 | 85 | 86 |
| H. petiolaris_TA3105_4234#1 | 87 | 88 |
| H. vulgare_TC155851#1 | 89 | 90 |
| H. vulgare_TC169422#1 | 91 | 92 |
| L. japonicus_TC37102#1 | 93 | 94 |
| L. japonicus_TC49381#1 | 95 | 96 |
| L. perennis_TA2207_43195#1 | 97 | 98 |
| L. saligna_TA1249_75948#1 | 99 | 100 |
| L. saligna_TA2654_75948#1 | 101 | 102 |
| L. sativa_TC16554#1 | 103 | 104 |
| L. sativa_TC20908#1 | 105 | 106 |
| L. serriola_TC1188#1 | 107 | 108 |
| L. virosa_TA2488_75947#1 | 109 | 110 |
| L. virosa_TA2701_75947#1 | 111 | 112 |
| M. polymorpha_TA1202_3197#1 | 113 | 114 |
| M. truncatula_AC136449_14.5#1 | 115 | 116 |
| M. truncatula_CT025837_26.4#1 | 117 | 118 |
| Medicago_truncatula_BT053473#1 | 119 | 120 |
| N. tabacum_TC41456#1 | 121 | 122 |
| N. tabacum_TC46283#1 | 123 | 124 |
| N. tabacum_TC72241#1 | 125 | 126 |
| Nicotiana_langsdorffii_x_sanderae_EB699100#1 | 127 | 128 |
| O. sativa_LOC_Os08g22149.1#1 | 129 | 130 |
| O. sativa_LOC_Os09g02710.1#1 | 131 | 132 |
| P. patens_TC30132#1 | 133 | 134 |
| P. patens_TC37673#1 | 135 | 136 |
| P. patens_TC42286#1 | 137 | 138 |
| P. patens_TC42494#1 | 139 | 140 |
| P. persica_TC10631#1 | 141 | 142 |
| P. taeda_TA12827_3352#1 | 143 | 144 |
| P. trichocarpa_549923#1 | 145 | 146 |
| P. trifoliata_TA8203_37690#1 | 147 | 148 |
| P. vulgaris_TC13521#1 | 149 | 150 |
| R. communis_TA2199_3988#1 | 151 | 152 |
| S. bicolor_Sb06g002220.1#1 | 153 | 154 |
| S. bicolor_Sb06g002220.2#1 | 155 | 156 |
| S. henryi_DT598835#1 | 157 | 158 |
| S. henryi_DT605075#1 | 159 | 160 |
| S. henryi_TA1396_13258#1 | 161 | 162 |
| S. lycopersicum_TC194328#1 | 163 | 164 |
| S. lycopersicum_TC197340#1 | 165 | 166 |
| S. lycopersicum_TC205614#1 | 167 | 168 |
| S. officinarum_TC88204#1 | 169 | 170 |
| S. tuberosum_TC163611#1 | 171 | 172 |
| S. tuberosum_TC170837#1 | 173 | 174 |
| S. tuberosum_TC177736#1 | 175 | 176 |
| S. tuberosum_TC184391#1 | 177 | 178 |
| T. aestivum_TC285265#1 | 179 | 180 |
| T. aestivum_TC330389#1 | 181 | 182 |
| T. cacao_TC4622#1 | 183 | 184 |
| T. officinale_TA5844_50225#1 | 185 | 186 |
| T. pratense_TA1696_57577#1 | 187 | 188 |
| Z. mays_c58992071gm030403@3921#1 | 189 | 190 |
| Z. mays_TC462721#1 | 191 | 192 |
| Z. mays_TC475890#1 | 193 | 194 |
| Zea_mays_BT064440#1 | 195 | 196 |
| Zea_mays_DQ244217#1 | 197 | 198 |
| Zea_mays_EU962300#1 | 199 | 200 |

[0713] Sequences have been tentatively assembled and publicly disclosed by research institutions, such as The Institute for Genomic Research (TIGR; beginning with TA). The Eukaryotic Gene Orthologs (EGO) database may be used to identify such related sequences, either by keyword search or by using the BLAST algorithm with the nucleic acid sequence or polypeptide sequence of interest. Special nucleic acid sequence databases have been created for particular organisms, such as by the Joint Genome Institute. Furthermore, access to proprietary databases, has allowed the identification of novel nucleic acid and polypeptide sequences.

[0714] 2. ExbB Polypeptides

[0715] Sequences (full length cDNA, ESTs or genomic) related to SEQ ID NO: 211 and SEQ ID NO: 212 were identified amongst those maintained in the Entrez Nucleotides database at the National Center for Biotechnology Information (NCBI) using database sequence search tools, such as the Basic Local Alignment Tool (BLAST) (Altschul et al. (1990) J. Mol. Biol. 215:403-410; and Altschul et al. (1997) Nucleic Acids Res. 25:3389-3402). The program is used to find regions of local similarity between sequences by comparing nucleic acid or polypeptide sequences to sequence databases and by calculating the statistical significance of matches. For example, the polypeptide encoded by the nucleic acid of SEQ ID NO: 1 was used for the TBLASTN algorithm, with default settings and the filter to ignore low complexity sequences set off. The output of the analysis was viewed by pairwise comparison, and ranked according to the probability score (E-value), where the score reflect the probability that a particular alignment occurs by chance (the lower the E-value, the more significant the hit). In addition to E-values, comparisons were also scored by percentage identity. Percentage identity refers to the number of identical nucleotides (or amino acids) between the two compared nucleic acid (or polypeptide) sequences over a particular length. In some instances, the default parameters may be adjusted to modify the stringency of the search. For example the E-value may be increased to show less stringent matches. This way, short nearly exact matches may be identified.

[0716] Table A2 provides a list of nucleic acid sequences related to SEQ ID NO: 211 and SEQ ID NO: 212.

TABLE A2
Examples of ExbB nucleic acids and polypeptides:

| | Nucleic | |
|---|---|---|
| | acid | Protein |
| | SEQ ID | SEQ ID |
| Name | NO: | NO: |
| Synechocystis PCC6803_sll1404_exbB3 | 211 | 212 |
| Acaryochloris marina MBIC11017 exbB1 | 213 | 214 |
| Acaryochloris marina MBIC11017 exbB2 | 215 | 216 |
| Acaryochloris marina MBIC11017 exbB3 | 217 | 218 |
| Anabaena variabilis ATCC 29413 exbB1 | 219 | 220 |
| Anabaena variabilis ATCC 29413 exbB2 | 221 | 222 |
| Anabaena variabilis ATCC 29413 exbB3 | 223 | 224 |
| Chlorobaculum tepidum CT1586 exbB3 | 225 | 226 |
| Cyanobacteria Yellowstone B-Prime CYB_0819 | 227 | 228 |
| exbB3 | | |
| Cyanothece sp. ATCC 51142 exbB1 | 229 | 230 |
| Cyanothece sp. ATCC 51142 exbB2 | 231 | 232 |
| Cyanothece sp. ATCC 51142 exbB3 | 233 | 234 |
| Fremyella diplosiphon Fd33 exbB3 | 235 | 236 |
| Gloeobacter violaceus PCC 7421 exbB2 | 237 | 238 |
| Gloeobacter violaceus PCC7421 glr1387 exbB3 | 239 | 240 |
| Microcystis aeruginosa NIES-843 exbB3 | 241 | 242 |
| Nostoc punctiforme PCC 73102 ExbB1 | 243 | 244 |
| Nostoc punctiforme PCC 73102 ExbB2 | 245 | 246 |
| Nostoc punctiforme PCC 73102 ExbB3 | 247 | 248 |
| Nostoc sp. PCC 7120 exbB3 | 249 | 250 |
| Nostoc sp. PCC 7120 exbB1 | 251 | 252 |
| Nostoc sp. PCC 7120 exbB2 | 253 | 254 |
| Rhodopseudomonas palustris CGA009 RPA1239 | 255 | 256 |
| exbB3 | | |
| Rhodopseudomonas palustris CGA009 RPA2127 | 257 | 258 |
| exbB3 | | |
| Synechococcus elongatus PCC 7942 exbB3 | 259 | 260 |
| Synechococcus sp. JA-3-3Ab exbB3 | 261 | 262 |
| Synechococcus sp. PCC 7002 plasmid pAQ7 exbB3 | 263 | 264 |
| Synechocystis PCC6803_sll0477_exbB1 | 265 | 266 |
| Synechocystis PCC6803_sll0677_exbB2 | 267 | 268 |
| Thermosynechococcus elongatus BP-1 exbB3 | 269 | 270 |
| Trichodesmium erythraeum IMS101 exbB3 | 271 | 272 |
| Chroococcales cyanobacterium HF070_14_C03 | 273 | 274 |
| exbB3 | | |

[0717] For eukaryotic homologues, sequences have been tentatively assembled and publicly disclosed by research institutions, such as The Institute for Genomic Research (TIGR; beginning with TA). For instance, the Eukaryotic Gene Orthologs (EGO) database may be used to identify such related sequences, either by keyword search or by using the BLAST algorithm with the nucleic acid sequence or polypeptide sequence of interest. Special nucleic acid sequence databases have been created for particular organisms, e.g. for certain prokaryotic organisms, such as by the Joint Genome Institute. Furthermore, access to proprietary databases, has allowed the identification of novel nucleic acid and polypeptide sequences.

[0718] 3. NMPRT Polypeptides

[0719] Sequences (full length cDNA, ESTs or genomic) related to SEQ ID NO: 281 and SEQ ID NO: 282 were identified amongst those maintained in the Entrez Nucleotides database at the National Center for Biotechnology Information (NCBI) using database sequence search tools, such as the Basic Local Alignment Tool (BLAST) (Altschul et al. (1990) J. Mol. Biol. 215:403-410; and Altschul et al. (1997) Nucleic Acids Res. 25:3389-3402). The program is used to find regions of local similarity between sequences by comparing nucleic acid or polypeptide sequences to sequence databases and by calculating the statistical significance of matches. For example, the polypeptide encoded by the nucleic acid of SEQ ID NO: 281 was used for the TBLASTN algorithm, with default settings and the filter to ignore low complexity sequences set off. The output of the analysis was viewed by pairwise comparison, and ranked according to the probability score (E-value), where the score reflect the probability that a particular alignment occurs by chance (the lower the E-value, the more significant the hit). In addition to E-values, comparisons were also scored by percentage identity. Percentage identity refers to the number of identical nucleotides (or amino acids) between the two compared nucleic acid (or polypeptide) sequences over a particular length. In some instances, the default parameters may be adjusted to modify the stringency of the search. For example the E-value may be increased to show less stringent matches. This way, short nearly exact matches may be identified.

[0720] Table A3 provides SEQ ID NO: 281 and SEQ ID NO: 282 and a list of nucleic acid sequences related to SEQ ID NO: 281 and SEQ ID NO: 282.

TABLE A3
Examples of NMPRT nucleic acids and polypeptides

| | Nucleic acid | Polypeptide |
|---|---|---|
| Source | SEQ ID NO: | SEQ ID NO: |
| Synechocystis sp. PCC 6803 | 281 | 282 |
| Aureococcus anophagefferens 39495 | 283 | 284 |
| Burkholderia phytofirmans PsJN | 285 | 286 |
| Chlamydomonas reinhardtii_206505 | 287 | 288 |
| Chlorella vulgaris_72572 | 289 | 290 |
| Chlorella_133026 | 291 | 292 |
| Deinococcus radiodurans R1 | 293 | 294 |
| Emiliania huxleyi 464234 | 295 | 296 |
| Hahella chejuensis KCTC 2396 | 297 | 298 |
| Magnetospirillum magneticum AMB-1 | 299 | 300 |
| Pasteurella multocida subsp Pm70 | 301 | 302 |
| Psychrobacter sp PRwf-1 | 303 | 304 |
| Ralstonia solanacearum GMI1000 | 305 | 306 |
| Stenotrophomonas maltophilia K279a | 307 | 308 |
| Synechococcus elongatus PCC6301 | 309 | 310 |
| Volvox carteri_90876 | 311 | 312 |
| Xanthomonas campestris B100 | 313 | 314 |
| Synechococcus elongatus PCC7942 | 325 | 326 |

[0721] For eukaryotic homologues, sequences have been tentatively assembled and publicly disclosed by research institutions, such as The Institute for Genomic Research (TIGR; beginning with TA). For instance, the Eukaryotic Gene Orthologs (EGO) database may be used to identify such related sequences, either by keyword search or by using the BLAST algorithm with the nucleic acid sequence or polypeptide sequence of interest. Special nucleic acid sequence databases have been created for particular organisms, e.g. for certain prokaryotic organisms, such as by the Joint Genome Institute. Furthermore, access to proprietary databases, has allowed the identification of novel nucleic acid and polypeptide sequences.

### Example 2

### Alignment of Sequences Related to the Polypeptide Sequences Used in the Methods of the Invention

[0722] 1. Loss of Timing of ET and JA Biosynthesis 1 (LEJ1) Polypeptides

[0723] Alignment of polypeptide sequences was performed using the ClustalW (2.0) algorithm of progressive alignment (Thompson et al. (1997) Nucleic Acids Res 25:4876-4882; Chema et al. (2003). Nucleic Acids Res 31:3497-3500) with standard setting (slow alignment, similarity matrix: Gonnet, gap opening penalty 10, gap extension penalty: 0.2). Minor manual editing was done to further optimise the alignment. The LEJ1 polypeptides are aligned in FIG. 2.

[0724] A phylogenetic tree of LEJ1 polypeptides (FIG. 3) was constructed from the sequences listed in Table A using the alignment and neighbour-joining clustering algorithm provided in MAFFT (Katoh et al., Nucleic Acids Res., 30:3059-3066, 2002). The tree is presented as a radial cladogram (Dendroscope: Huson et al. (2007), BMC Bioinformatics 8(1):460)).

[0725] 2. ExbB Polypeptides

[0726] Alignment of polypeptide sequences was performed using the AlignX programme from the Vector NTI (Invitrogen), which is based on the ClustalW 2.0 algorithm for progressive alignment (Thompson et al. (1997) Nucleic Acids Res 25:4876-4882; Chema et al. (2003). Nucleic Acids Res 31:3497-3500); Alingment was performed with standard settings: gap opening penalty 10, gap extension penalty: 0.2. Minor manual editing was done to further optimise the alignment. Highly conserved amino acid residues are indicated in the consensus sequence. The ExbB polypeptides are aligned in FIG. 7.

[0727] An alternative alignment of polypeptide sequences was performed using the ClustalW (1.81) algorithm of progressive alignment (Thompson et al. (1997) Nucleic Acids Res 25:4876-4882; Chema et al. (2003). Nucleic Acids Res 31:3497-3500) with standard setting (slow alignment, similarity matrix: or Blosum 62, gap opening penalty 10, gap extension penalty: 0.2). Minor manual editing was done to further optimise the alignment. The ExbB polypeptides are aligned in FIG. 8.

[0728] A phylogenetic tree of ExbB polypeptides (FIG. 9) was constructed using a neighbour-joining clustering algorithm as provided in the ClustalW programme as used for the alignment of FIG. 8.

[0729] 3. NMPRT Polypeptides

[0730] Alignment of polypeptide sequences was performed using the ClustalW 1.8 algorithm of progressive alignment (Thompson et al. (1997) Nucleic Acids Res 25:4876-4882; Chema et al. (2003). Nucleic Acids Res 31:3497-3500) with standard setting (slow alignment, similarity matrix: Blosum 62, gap opening penalty 10, gap extension penalty: 0.2). Minor manual editing was done to further optimise the alignment. The NMPRT polypeptides are aligned in FIG. 13. A phylogenetic tree of NMPRT polypeptides is shown in Gazzaniga et al. 2009.

### Example 3

### Calculation of Global Percentage Identity Between Polypeptide Sequences

[0731] Global percentages of similarity and identity between full length polypeptide sequences useful in performing the methods of the invention were determined using MatGAT (Matrix Global Alignment Tool; BMC Bioinformatics. 2003 4:29. MatGAT: an application that generates similarity/identity matrices using protein or DNA sequences. Campanella J J, Bitincka L, Smalley J; software hosted by Ledion Bitincka). MatGAT generates similarity/identity matrices for DNA or protein sequences without needing pre-alignment of the data. The program performs a series of pair-wise alignments using the Myers and Miller global alignment algorithm (with a gap opening penalty of 12, and a gap extension penalty of 2), calculates similarity and identity using for example Blosum 62 (for polypeptides), and then places the results in a distance matrix.

[0732] 1. Loss of Timing of ET and JA Biosynthesis 1 (LEJ1) Polypeptides

[0733] The global similarity and identity over the full length of the polypeptide sequences is shown in FIG. 4. Sequence similarity is shown in the bottom half of the dividing line and sequence identity is shown in the top half of the diagonal dividing line. Parameters used in the comparison were: Scoring matrix: Blosum62, First Gap: 12, Extending Gap: 2. The sequence identity (in %) between the LEJ1 polypeptide sequences useful in performing the methods of the invention can be as low as 37% (when all protein sequences of Table A1 are considered), or as low as 60% (when the closest orthologues are considered) compared to SEQ ID NO: 2.

[0734] 2. ExbB Polypeptides

[0735] Results of the software analysis are shown in FIG. 11 for the global similarity and identity over the full length of the polypeptide sequences as shown in Table A. Sequence similarity is shown in the bottom half of the dividing line and sequence identity is shown in the top half of the diagonal dividing line. Parameters used in the comparison were: Scoring matrix: Blosum62, First Gap: 12, Extending Gap: 2. The sequence identity (in %) between the ExbB polypeptide sequences useful in performing the methods of the invention can be as low as 18%, thus is generally higher than 18% compared to SEQ ID NO: 212.

[0736] 3. NMPRT Polypeptides

[0737] Results of the software analysis are shown in Table B1 for the global similarity and identity over the full length of the polypeptide sequences. Sequence similarity is shown in the bottom half of the dividing line and sequence identity is shown in the top half of the diagonal dividing line. Parameters used in the comparison were: Scoring matrix: Blosum62, First Gap: 12, Extending Gap: 2. The sequence identity (in %) between the NMPRT polypeptide sequences useful in performing the methods of the invention can be as low as 21.4% (is generally higher than 21.4%) compared to SEQ ID NO: 282.

TABLE B1
MatGAT results for global similarity and identity over the full length of the polypeptide sequences.

| | 1 | 2 | 3 | 4 | 5 | 6 | 7 | 8 | 9 |
|---|---|---|---|---|---|---|---|---|---|
| 1. Synechocystis sp. PCC 6803 | | 47.7 | 56.7 | 34.3 | 27 | 33.9 | 56.9 | 21.4 | 54.8 |
| 2. Aureococcus anophagefferens 39495 | 62 | | 47 | 35.6 | 27.4 | 33.1 | 45.9 | 24.1 | 49.7 |
| 3. Burkholderia phytofirmans PsJN | 71.8 | 63.4 | | 35 | 26.9 | 31.3 | 53.6 | 23.9 | 55.4 |
| 4. Chlamydomonas reinhardtii_206505 | 49 | 52 | 50.2 | | 49.3 | 54.1 | 34.4 | 20.8 | 36 |
| 5. Chlorella vulgaris_72572 | 39.2 | 41.2 | 39.8 | 60.2 | | 48.5 | 28.3 | 20.7 | 27.5 |
| 6. Chlorella_133026 | 49.9 | 50.9 | 48.7 | 72.3 | 58.3 | | 33.7 | 20.6 | 32.1 |
| 7. Deinococcus radiodurans R1 | 72.3 | 60.2 | 69.9 | 49.8 | 39.5 | 49.5 | | 22.6 | 54.4 |
| 8. Emiliania huxleyi 464234 | 31.4 | 34.8 | 32.8 | 33.3 | 35 | 31.7 | 30.9 | | 21.8 |
| 9. Hahella chejuensis KCTC 2396 | 70.1 | 62.8 | 69.3 | 52.4 | 41.4 | 47.7 | 70.6 | 31.1 | |
| 10. Magnetospirillum magneticum AMB-1 | 70.5 | 59.4 | 68 | 48.8 | 40.5 | 49.5 | 66.9 | 33.1 | 70.9 |
| 11. Pasteurella multocida subsp Pm70 | 70.1 | 61.8 | 68 | 53.6 | 41.9 | 49.1 | 69.3 | 32.9 | 76.6 |
| 12. Psychrobacter sp PRwf-1 | 68.6 | 62.4 | 68 | 54.9 | 43.7 | 52.5 | 70.5 | 32.2 | 75.3 |
| 13. Ralstonia solanacearum GMI 1000 | 71.6 | 64.8 | 86.5 | 50.8 | 39.7 | 49.3 | 68.5 | 32.8 | 70.2 |
| 14. Stenotrophomonas maltophilia K279a | 72.7 | 64 | 76 | 52.2 | 41.2 | 50.9 | 69.9 | 33.1 | 70.4 |
| 15. Synechococcus elongatus PCC7942 | 74.7 | 62.4 | 70.9 | 51.4 | 40.6 | 49.9 | 71.4 | 32.5 | 70.3 |
| 16. Volvox carteri_90876 | 48.3 | 51.1 | 50.5 | 88.1 | 57.5 | 70.2 | 48.9 | 34 | 51.5 |
| 17. Xanthomonas campestris | 70.8 | 64 | 75.8 | 50.6 | 42.9 | 52.1 | 68.8 | 33 | 69.6 |

| | 10 | 11 | 12 | 13 | 14 | 15 | 16 | 17 |
|---|---|---|---|---|---|---|---|---|
| 1. Synechocystis sp. PCC 6803 | 54.5 | 50.5 | 51.1 | 58.6 | 58 | 58.3 | 34.4 | 55 |
| 2. Aureococcus anophagefferens 39495 | 45.2 | 45.5 | 45.5 | 49.3 | 49.1 | 45.9 | 35.4 | 45.6 |
| 3. Burkholderia phytofirmans PsJN | 54.9 | 52.2 | 52.7 | 75.7 | 60.3 | 53 | 34.6 | 57.9 |
| 4. Chlamydomonas reinhardtii_206505 | 32.9 | 35.5 | 36 | 36.9 | 34.3 | 32 | 80.4 | 34 |
| 5. Chlorella vulgaris_72572 | 26.8 | 29.5 | 30.9 | 27.1 | 28 | 28.5 | 45.8 | 28.7 |
| 6. Chlorella_133026 | 32.1 | 31.3 | 32.1 | 32.1 | 34.7 | 31.8 | 51.9 | 34.8 |
| 7. Deinococcus radiodurans R1 | 52.5 | 51.6 | 52.2 | 53.1 | 55.7 | 55.1 | 34.9 | 52.4 |
| 8. Emiliania huxleyi 464234 | 22.7 | 21.3 | 21.5 | 23.5 | 23.5 | 22.2 | 21.7 | 23.3 |
| 9. Hahella chejuensis KCTC 2396 | 55.3 | 59.1 | 58.2 | 55.6 | 53.9 | 51.3 | 35.9 | 52.4 |
| 10. Magnetospirillum magneticum AMB-1 | | 52.9 | 52.9 | 53.8 | 58.5 | 50 | 33.8 | 57 |
| 11. Pasteurella multocida subsp Pm70 | 69.9 | | 68.6 | 49.1 | 52.5 | 50.1 | 34.4 | 50.8 |
| 12. Psychrobacter sp PRwf-1 | 71.2 | 83.4 | | 50.2 | 52.2 | 50.4 | 35.6 | 50.3 |
| 13. Ralstonia solanacearum GMI 1000 | 66.9 | 65.4 | 66.5 | | 64.1 | 53.8 | 36.1 | 61.5 |
| 14. Stenotrophomonas maltophilia K279a | 70.8 | 70.1 | 70.8 | 75.8 | | 55.3 | 34.7 | 74.6 |
| 15. Synechococcus elongatus PCC7942 | 67.9 | 70.6 | 68.6 | 70.6 | 71.2 | | 32.3 | 53.4 |
| 16. Volvox carteri_90876 | 48.3 | 51.5 | 53 | 51.1 | 52 | 51.5 | | 32.8 |
| 17. Xanthomonas campestris | 68.8 | 69.2 | 68.8 | 77.6 | 83.4 | 69.2 | 50.3 | |

### Example 4

### Identification of Domains Comprised in Polypeptide Sequences Useful in Performing the Methods of the Invention

[0738] The Integrated Resource of Protein Families, Domains and Sites (InterPro) database is an integrated interface for the commonly used signature databases for text- and sequence-based searches. The InterPro database combines these databases, which use different methodologies and varying degrees of biological information about well-characterized proteins to derive protein signatures. Collaborating databases include SWISS-PROT, PROSITE, TrEMBL, PRINTS, Propom and Pfam, Smart and TIGRFAMs. Pfam is a large collection of multiple sequence alignments and hidden Markov models covering many common protein domains and families. Pfam is hosted at the Sanger Institute server in the United Kingdom. Interpro is hosted at the European Bioinformatics Institute in the United Kingdom.

[0739] 1. Loss of Timing of ET and JA Biosynthesis 1 (LEJ1) Polypeptides

[0740] The results of the InterPro scan of the polypeptide sequence as represented by SEQ ID NO: 2 are presented in Table C1.

TABLE C1
InterPro scan results (major accession numbers) of the polypeptide sequence as represented by SEQ ID NO: 2.

| Protein Length | Database | Number | Name | start | stop | p-value | InterPro family | |
|---|---|---|---|---|---|---|---|---|
| 238 | HMMPfam | PF00571 | CBS | 83 | 228 | 1.00E−17 | IPR000644 | Cystathionine beta- |
| | | | | | | | | synthase, core |
| 238 | HMMSmart | SM00116 | CBS | 88 | 136 | 1.30E+10 | IPR000644 | Cystathionine beta- |
| | | | | | | | | synthase, core |
| 238 | HMMSmart | SM00116 | CBS | 180 | 228 | 4.50E+01 | IPR000644 | Cystathionine beta- |
| | | | | | | | | synthase, core |
| 238 | ProfileScan | PS51371 | CBS | 83 | 145 | 0.00E+00 | IPR000644 | Cystathionine beta- |
| | | | | | | | | synthase, core |
| 238 | ProfileScan | PS51371 | CBS | 177 | 234 | 0.00E+00 | IPR000644 | Cystathionine beta- |
| | | | | | | | | synthase, core |
| 238 | superfamily | SSF54631 | SSF54631 | 73 | 132 | 1.80E+03 | NULL | NULL |
| 238 | superfamily | SSF54631 | SSF54631 | 167 | 229 | 1.70E−15 | NULL | NULL |
| 238 | HMMPanther | PTHR11911:SF5 | PTHR11911:SF5 | 11 | 238 | 3.90E−62 | NULL | NULL |
| 238 | HMMPanther | PTHR11911:SF5 | PTHR11911:SF5 | 11 | 238 | 3.90E−62 | NULL | NULL |
| 238 | HMMPanther | PTHR11911 | PTHR11911 | 11 | 238 | 3,90E−62 | NULL | NULL |
| 238 | HMMPanther | PTHR11911 | PTHR11911 | 11 | 238 | 3.90E−62 | NULL | NULL |

[0741] 2. ExbB Polypeptides

[0742] The results of the InterPro scan of the polypeptide sequence as represented by SEQ ID NO: 212 are presented in Table C2.

TABLE C2
InterPro scan results (major accession numbers) of the polypeptide
sequence as represented by SEQ ID NO: 212.

| | | | Amino acid coordinates on |
|---|---|---|---|
| | | | SEQ ID NO 212, e-value |
| | Accession | Accession | [amino acid position |
| Database | number | name | of the domain] |
| PFAM | PF01618 | MotA_ExbB | 3.2E-48 [48-188]T |

[0743] PF01618 is also indicated at the bottom part of the alignment of FIG. 7.

[0744] 3. NMPRT Polypeptides

[0745] The results of the InterPro scan of the polypeptide sequence as represented by SEQ ID NO: 282 are presented in Table C3.

TABLE C3
InterPro scan results (major accession numbers) of the polypeptide
sequence as represented by SEQ ID NO: 282.

| | | | Amino acid |
|---|---|---|---|
| | | | coordinates on |
| Database | Accession number | Accession name | SEQ ID NO 282 |
| InterPro | IPR016471 | NMPRT | [1-461] |
| PANTHER | PTHR11098 | PTHR11098 | [64-459] |
| PANTHER | PTHR11098:SF2 | PTHR11098:SF2 | ]64-459] |
| PFAM | PF04095 | NAPRTase | [170-437] |

### Example 5

### Topology Prediction of the LEJ1 Polypeptide Sequences

[0746] 1. Loss of Timing of ET and JA Biosynthesis 1 (LEJ1) Polypeptides

[0747] TargetP 1.1 predicts the subcellular location of eukaryotic proteins. The location assignment is based on the predicted presence of any of the N-terminal pre-sequences: chloroplast transit peptide (cTP), mitochondrial targeting peptide (mTP) or secretory pathway signal peptide (SP). Scores on which the final prediction is based are not really probabilities, and they do not necessarily add to one. However, the location with the highest score is the most likely according to TargetP, and the relationship between the scores (the reliability class) may be an indication of how certain the prediction is. The reliability class (RC) ranges from 1 to 5, where 1 indicates the strongest prediction. TargetP is maintained at the server of the Technical University of Denmark.

[0748] For the sequences predicted to contain an N-terminal presequence a potential cleavage site can also be predicted.

[0749] A number of parameters were selected, such as organism group (non-plant or plant), cutoff sets (none, predefined set of cutoffs, or user-specified set of cutoffs), and the calculation of prediction of cleavage sites (yes or no).

[0750] The results of TargetP 1.1 analysis of the polypeptide sequence as represented by SEQ ID NO: 2 are presented Table Dl. The “plant” organism group has been selected, no cutoffs defined, and the predicted length of the transit peptide requested. The subcellular localization of the polypeptide sequence as represented by SEQ ID NO: 2 is predicted to be the chloroplast with a high probability score.

TABLE D1
TargetP 1.1 analysis of the polypeptide sequence as represented by SEQ ID NO: 2.

| Name | Len | cTP | mTP | SP | other | Loc | RC | TPlen |
|---|---|---|---|---|---|---|---|---|
| A.thaliana_AT4G34120 | 238 | 0.879 | 0.050 | 0.007 | 0.026 | C | 1 | 71 |
| cutoff | | 0.000 | 0.000 | 0.000 | 0.000 | | | |

Abbreviations: Len, Length; cTP, Chloroplastic transit peptide; mTP, Mitochondrial transit peptide, SP, Secretory pathway signal peptide, other, Other subcellular targeting, Loc, Predicted Location; RC, Reliability class; TPlen, Predicted transit peptide length.

[0751] Many other algorithms can be used to perform such analyses, including:
[0752] ChloroP 1.1 hosted on the server of the Technical University of Denmark;
[0753] Protein Prowler Subcellular Localisation Predictor version 1.2 hosted on the server of the Institute for Molecular Bioscience, University of Queensland, Brisbane, Australia;
[0754] PENCE Proteome Analyst PA-GOSUB 2.5 hosted on the server of the University of Alberta, Edmonton, Alberta, Canada;
[0755] TMHMM, hosted on the server of the Technical University of Denmark
[0756] PSORT (URL: psort.org)
[0757] PLOC (Park and Kanehisa, Bioinformatics, 19, 1656-1663, 2003).

[0758] 2. ExbB Polypeptides

[0759] TargetP 1.1 predicts the subcellular location of eukaryotic proteins. The location assignment is based on the predicted presence of any of the N-terminal pre-sequences: chloroplast transit peptide (cTP), mitochondrial targeting peptide (mTP) or secretory pathway signal peptide (SP). Scores on which the final prediction is based are not really probabilities, and they do not necessarily add to one. However, the location with the highest score is the most likely according to TargetP, and the relationship between the scores (the reliability class) may be an indication of how certain the prediction is. The reliability class (RC) ranges from 1 to 5, where 1 indicates the strongest prediction. TargetP is maintained at the server of the Technical University of Denmark.

[0760] For the sequences predicted to contain an N-terminal presequence a potential cleavage site can also be predicted.

[0761] In addition, or alternatively, many other algorithms can be used to perform such analyses, including:
[0762] ChloroP 1.1 hosted on the server of the Technical University of Denmark;
[0763] Protein Prowler Subcellular Localisation Predictor version 1.2 hosted on the server of the Institute for Molecular Bioscience, University of Queensland, Brisbane, Australia;
[0764] PENCE Proteome Analyst PA-GOSUB 2.5 hosted on the server of the University of Alberta, Edmonton, Alberta, Canada;
[0765] TMHMM, hosted on the server of the Technical University of Denmark
[0766] PSORT (URL: psort.org)
[0767] PLOC (Park and Kanehisa, Bioinformatics, 19, 1656-1663, 2003).

### Example 6

### Assay Related to the Polypeptide Sequences Useful in Performing the Methods of the Invention

[0768] 1. NMPRT Polypeptides

[0769] An enzyme activity assay for the characterisation of a NMPRT polypeptide is described in Gerdes et al. (2006).

[0770] Briefly, enzyme activity assays for determining NaMNAT and NMNAT activities use coupled spectrophotometric assays (see Kurnasov et al. 2002, J. Bacteriol. 184:6906-6917). The NMNAT assay is based on the coupling of NAD formation to alcohol dehydrogenase-catalyzed conversion of NAD to NADH monitored by UV absorbance at 340 nm, as originally developed by Balducci et al. (1995, Anal. Biochem. 228:64-68). The reaction is started by adding NMN to 1 mM and monitored at 340 nm over a 20-min period. To measure the NaMN-specific activity, the procedure is modified by introducing an additional enzymatic step, a conversion of deamido-NAD (NaAD) to NAD by an added excess of pure recombinant NADS (see Kurnasov et al. 2002).

[0771] NADS activity can be measured by a continuous coupled spectrophotometric assay for NADS activity. Reaction mixtures contain 1 mM NaAD, 2 mM ATP, 10 mM MgCl₂, 7 U/ml alcohol dehydrogenase (Sigma), 46 mM ethanol, 16 mM semicarbazide (or 2 mM NaHSO₃), and 4 mMNH₄Cl (or 2 mM glutamine) in 100 mM HEPES (pH 8.5). The reactions are carried out at 37° C. and monitored by the change in UV absorbance at 340 nm using a Beckman DU-640 spectrophotometer or, for kinetic studies, in 96-well plates using a Tecan-Plus reader (see Kurnasov et al. 2002).

[0772] NMPRT activity can be measure by a continuous spectrophotometric assay. This assay couples the NMPRT activity to NADH formation via two additional enzymatic steps: (a) conversion of NMN to NAD by NMNAT (a recombinant human enzyme PNAT-3 with dual NMN/NaMN specificity overexpressed and purified (see Zhang et al. 2003, J. Biol. Chem. 278:13503-13511) and (b) alcohol dehydrogenase-catalyzed conversion of NAD to NADH. The assay can be performed as described above for the NMNAT assay, except that the reaction mixture contained 2.0 mM nicotinamide instead of NMN, 5 mM ATP, and 0.15 U of human NMNAT. The reaction was initiated by the addition of phosphoribosyl pyrophosphate (PRPP) to 2 mM.

[0773] In an example, for Synechocystis sp. strain PCC 6803 biochemical characterisation indicated the following activity for NMPRT: enzymatic activity (in U/mg) on substrate 1 (Nam) was 0.5 and on substrate 2 (NA) 0.003, with a ratio of more than 150/1 (see Table 3 of Gerdes et al. 2006)

### Example 7

### Cloning of the Nucleic Acid Sequence Used in the Methods of the Invention

[0774] 1. Loss of Timing of ET and JA Biosynthesis 1 (LEJ1) Polypeptides

[0775] The nucleic acid sequence was amplified by PCR using as template a custom-made Arabidopsis thaliana seedlings cDNA library. PCR was performed using Hifi Taq DNA polymerase in standard conditions, using 200 ng of template in a 50 μl PCR mix. The primers used were prm14149 (SEQ ID NO: 203; sense, start codon in bold): 5′-ggggacaa gtttgtacaaaaaagcaggcttaaacaatgggttcaatctctttatcc-3′ and prm14150 (SEQ ID NO: 204; reverse, complementary): 5′-ggggaccactttgtacaagaaagctgggtattcagatctgctccatcact-3′, which include the AttB sites for Gateway recombination. The amplified PCR fragment was purified also using standard methods. The first step of the Gateway procedure, the BP reaction, was then performed, during which the PCR fragment recombined in vivo with the pDONR201 plasmid to produce, according to the Gateway terminology, an “entry clone”, pLEJ1. Plasmid pDONR201 was purchased from Invitrogen, as part of the Gateway® technology.

[0776] The entry clone comprising SEQ ID NO: 1 was then used in an LR reaction with a destination vector used for Oryza sativa transformation. This vector contained as functional elements within the T-DNA borders: a plant selectable marker; a screenable marker expression cassette; and a Gateway cassette intended for LR in vivo recombination with the nucleic acid sequence of interest already cloned in the entry clone. A rice GOS2 promoter (SEQ ID NO: 201) for constitutive expression was located upstream of this Gateway cassette.

[0777] After the LR recombination step, the resulting expression vector pGOS2::LEJ1 (FIG. 5) was transformed into Agrobacterium strain LBA4044 according to methods well known in the art.

[0778] 2. ExbB Polypeptides

[0779] The nucleic acid sequence was amplified by PCR using as template Synechocystis sp. PCC 6803 genomic DNA. PCR was performed using Hifi Taq DNA polymerase in standard conditions, using 200 ng of template in a 50 μl PCR mix. The primers used were prm14244 (SEQ ID NO: 277; sense): 5′-ggggacaagtttgtacaaaaaagcaggcttaaacaatggccgggggcatag-3′ and prm14243 (SEQ ID NO: 278; reverse, complementary): 5′-ggggaccactttgtacaaga aagctgggttcatcgggaagtcgcatactctt-3′, which include the AttB sites for Gateway recombination. The amplified PCR fragment was purified also using standard methods. The first step of the Gateway procedure, the BP reaction, was then performed, during which the PCR fragment recombined in vivo with the pDONR201 plasmid to produce, according to the Gateway terminology, an “entry clone”, ExbB. Plasmid pDONR201 was purchased from Invitrogen, as part of the Gateway® technology.

[0780] The entry clone comprising SEQ ID NO: 211 was then used in an LR reaction with a destination vector used for Oryza sativa transformation. This vector contained as functional elements within the T-DNA borders: a plant selectable marker; a screenable marker expression cassette; and a Gateway cassette intended for LR in vivo recombination with the nucleic acid sequence of interest already cloned in the entry clone. A rice GOS2 promoter (SEQ ID NO: 275) for constitutive specific expression was located upstream of this Gateway cassette.

[0781] In a second example, a root specific promoter (pRs: SEQ ID NO: 276) for root specific expression was located upstream of the Gateway cassette.

[0782] After the LR recombination step, the resulting expression vector pGOS2::ExbB (FIG. 10) and pRs::ExbB were independently transformed into Agrobacterium strain LBA4044 according to methods well known in the art.

[0783] 3. NMPRT Polypeptides

[0784] The nucleic acid sequence was amplified by PCR using as template Synechocystis sp. PCC 6803 genomic DNA. PCR was performed using Hifi Taq DNA polymerase in standard conditions, using 200 ng of template in a 50 μl PCR mix. The primers used were prm14234 (SEQ ID NO: 316; sense, start codon in bold): 5′-ggggacaagtttgtacaaaaaagcaggcttaaaca atgaatactaatctcattctggatg-3′ and prm14233 (SEQ ID NO: 317; reverse, complementary): 5′-ggggaccactttgtacaagaaagctgggtctagcttgcgggaacatt-3′, which include the AttB sites for Gateway recombination. The amplified PCR fragment was purified also using standard methods. The first step of the Gateway procedure, the BP reaction, was then performed, during which the PCR fragment recombined in vivo with the pDONR201 plasmid to produce, according to the Gateway terminology, an “entry clone”, pNMPRT. Plasmid pDONR201 was purchased from Invitrogen, as part of the Gateway® technology.

[0785] The entry clone comprising SEQ ID NO: 281 was then used in an LR reaction with a destination vector used for Oryza sativa transformation. This vector contained as functional elements within the T-DNA borders: a plant selectable marker; a screenable marker expression cassette; and a Gateway cassette intended for LR in vivo recombination with the nucleic acid sequence of interest already cloned in the entry clone. A rice GOS2 promoter (SEQ ID NO: 324) for constitutive specific expression was located upstream of this Gateway cassette.

[0786] After the LR recombination step, the resulting expression vector pGOS2::NMPRT (FIG. 14) was transformed into Agrobacterium strain LBA4044 according to methods well known in the art.

### Example 8

### Plant Transformation

[0787] Rice Transformation

[0788] The Agrobacterium containing the expression vector was used to transform Oryza sativa plants. Mature dry seeds of the rice japonica cultivar Nipponbare were dehusked. Sterilization was carried out by incubating for one minute in 70% ethanol, followed by 30 minutes in 0.2% HgCl₂, followed by a 6 times 15 minutes wash with sterile distilled water. The sterile seeds were then germinated on a medium containing 2,4-D (callus induction medium). After incubation in the dark for four weeks, embryogenic, scutellum-derived calli were excised and propagated on the same medium. After two weeks, the calli were multiplied or propagated by subculture on the same medium for another 2 weeks. Embryogenic callus pieces were sub-cultured on fresh medium 3 days before co-cultivation (to boost cell division activity).

[0789] Agrobacterium strain LBA4404 containing the expression vector was used for co-cultivation. Agrobacterium was inoculated on AB medium with the appropriate antibiotics and cultured for 3 days at 28° C. The bacteria were then collected and suspended in liquid co-cultivation medium to a density (OD₆₀₀) of about 1. The suspension was then transferred to a Petri dish and the calli immersed in the suspension for 15 minutes. The callus tissues were then blotted dry on a filter paper and transferred to solidified, co-cultivation medium and incubated for 3 days in the dark at 25° C. Co-cultivated calli were grown on 2,4-D-containing medium for 4 weeks in the dark at 28° C. in the presence of a selection agent. During this period, rapidly growing resistant callus islands developed. After transfer of this material to a regeneration medium and incubation in the light, the embryogenic potential was released and shoots developed in the next four to five weeks. Shoots were excised from the calli and incubated for 2 to 3 weeks on an auxin-containing medium from which they were transferred to soil. Hardened shoots were grown under high humidity and short days in a greenhouse.

[0790] Approximately 35 independent T0 rice transformants were generated for one construct. The primary transformants were transferred from a tissue culture chamber to a greenhouse. After a quantitative PCR analysis to verify copy number of the T-DNA insert, only single copy transgenic plants that exhibit tolerance to the selection agent were kept for harvest of T1 seed. Seeds were then harvested three to five months after transplanting. The method yielded single locus transformants at a rate of over 50% (Aldemita and Hodges1996, Chan et al. 1993, Hiei et al. 1994).

### Example 9

### Transformation of Other Crops

[0791] Corn Transformation

[0792] Transformation of maize (Zea mays) is performed with a modification of the method described by Ishida et al. (1996) Nature Biotech 14(6): 745-50. Transformation is genotype-dependent in corn and only specific genotypes are amenable to transformation and regeneration. The inbred line A188 (University of Minnesota) or hybrids with A188 as a parent are good sources of donor material for transformation, but other genotypes can be used successfully as well. Ears are harvested from corn plant approximately 11 days after pollination (DAP) when the length of the immature embryo is about 1 to 1.2 mm. Immature embryos are cocultivated with Agrobacterium tumefaciens containing the expression vector, and transgenic plants are recovered through organogenesis. Excised embryos are grown on callus induction medium, then maize regeneration medium, containing the selection agent (for example imidazolinone but various selection markers can be used). The Petri plates are incubated in the light at 25° C. for 2-3 weeks, or until shoots develop. The green shoots are transferred from each embryo to maize rooting medium and incubated at 25° C. for 2-3 weeks, until roots develop. The rooted shoots are transplanted to soil in the greenhouse. T1 seeds are produced from plants that exhibit tolerance to the selection agent and that contain a single copy of the T-DNA insert.

[0793] Wheat Transformation

[0794] Transformation of wheat is performed with the method described by Ishida et al. (1996) Nature Biotech 14(6): 745-50. The cultivar Bobwhite (available from CIMMYT, Mexico) is commonly used in transformation. Immature embryos are co-cultivated with Agrobacterium tumefaciens containing the expression vector, and transgenic plants are recovered through organogenesis. After incubation with Agrobacterium, the embryos are grown in vitro on callus induction medium, then regeneration medium, containing the selection agent (for example imidazolinone but various selection markers can be used). The Petri plates are incubated in the light at 25° C. for 2-3 weeks, or until shoots develop. The green shoots are transferred from each embryo to rooting medium and incubated at 25° C. for 2-3 weeks, until roots develop. The rooted shoots are transplanted to soil in the greenhouse. T1 seeds are produced from plants that exhibit tolerance to the selection agent and that contain a single copy of the T-DNA insert.

[0795] Soybean Transformation

[0796] Soybean is transformed according to a modification of the method described in the Texas A&M U.S. Pat. No. 5,164,310. Several commercial soybean varieties are amenable to transformation by this method. The cultivar Jack (available from the Illinois Seed foundation) is commonly used for transformation. Soybean seeds are sterilised for in vitro sowing. The hypocotyl, the radicle and one cotyledon are excised from seven-day old young seedlings. The epicotyl and the remaining cotyledon are further grown to develop axillary nodes. These axillary nodes are excised and incubated with Agrobacterium tumefaciens containing the expression vector. After the cocultivation treatment, the explants are washed and transferred to selection media. Regenerated shoots are excised and placed on a shoot elongation medium. Shoots no longer than 1 cm are placed on rooting medium until roots develop. The rooted shoots are transplanted to soil in the greenhouse. T1 seeds are produced from plants that exhibit tolerance to the selection agent and that contain a single copy of the T-DNA insert.

[0797] Rapeseed/Canola Transformation

[0798] Cotyledonary petioles and hypocotyls of 5-6 day old young seedling are used as explants for tissue culture and transformed according to Babic et al. (1998, Plant Cell Rep 17: 183-188). The commercial cultivar Westar (Agriculture Canada) is the standard variety used for transformation, but other varieties can also be used. Canola seeds are surface-sterilized for in vitro sowing. The cotyledon petiole explants with the cotyledon attached are excised from the in vitro seedlings, and inoculated with Agrobacterium (containing the expression vector) by dipping the cut end of the petiole explant into the bacterial suspension. The explants are then cultured for 2 days on MSBAP-3 medium containing 3 mg/l BAP, 3% sucrose, 0.7 Phytagar at 23° C., 16 hr light. After two days of co-cultivation with Agrobacterium, the petiole explants are transferred to MSBAP-3 medium containing 3 mg/l BAP, cefotaxime, carbenicillin, or timentin (300 mg/l) for 7 days, and then cultured on MSBAP-3 medium with cefotaxime, carbenicillin, or timentin and selection agent until shoot regeneration. When the shoots are 5-10 mm in length, they are cut and transferred to shoot elongation medium (MSBAP-0.5, containing 0.5 mg/l BAP). Shoots of about 2 cm in length are transferred to the rooting medium (MS0) for root induction. The rooted shoots are transplanted to soil in the greenhouse. T1 seeds are produced from plants that exhibit tolerance to the selection agent and that contain a single copy of the T-DNA insert.

[0799] Alfalfa Transformation

[0800] A regenerating clone of alfalfa (Medicago sativa) is transformed using the method of (McKersie et al., 1999 Plant Physiol 119: 839-847). Regeneration and transformation of alfalfa is genotype dependent and therefore a regenerating plant is required. Methods to obtain regenerating plants have been described. For example, these can be selected from the cultivar Rangelander (Agriculture Canada) or any other commercial alfalfa variety as described by Brown D C W and A Atanassov (1985. Plant Cell Tissue Organ Culture 4: 111-112). Alternatively, the RA3 variety (University of Wisconsin) has been selected for use in tissue culture (Walker et al., 1978 μm J Bot 65:654-659). Petiole explants are cocultivated with an overnight culture of Agrobacterium tumefaciens C58C1 pMP90 (McKersie et al., 1999 Plant Physiol 119: 839-847) or LBA4404 containing the expression vector. The explants are cocultivated for 3 d in the dark on SH induction medium containing 288 mg/L Pro, 53 mg/L thioproline, 4.35 g/L K2SO4, and 100 μm acetosyringinone. The explants are washed in half-strength Murashige-Skoog medium (Murashige and Skoog, 1962) and plated on the same SH induction medium without acetosyringinone but with a suitable selection agent and suitable antibiotic to inhibit Agrobacterium growth. After several weeks, somatic embryos are transferred to BOi2Y development medium containing no growth regulators, no antibiotics, and 50 g/L sucrose. Somatic embryos are subsequently germinated on half-strength Murashige-Skoog medium. Rooted seedlings were transplanted into pots and grown in a greenhouse. T1 seeds are produced from plants that exhibit tolerance to the selection agent and that contain a single copy of the T-DNA insert.

[0801] Cotton Transformation

[0802] Cotton is transformed using Agrobacterium tumefaciens according to the method described in U.S. Pat. No. 5,159,135. Cotton seeds are surface sterilised in 3% sodium hypochlorite solution during 20 minutes and washed in distilled water with 500 μg/ml cefotaxime. The seeds are then transferred to SH-medium with 50 μg/ml benomyl for germination. Hypocotyls of 4 to 6 days old seedlings are removed, cut into 0.5 cm pieces and are placed on 0.8% agar. An Agrobacterium suspension (approx. 108 cells per ml, diluted from an overnight culture transformed with the gene of interest and suitable selection markers) is used for inoculation of the hypocotyl explants. After 3 days at room temperature and lighting, the tissues are transferred to a solid medium (1.6 g/l Gelrite) with Murashige and Skoog salts with B5 vitamins (Gamborg et al., Exp. Cell Res. 50:151-158 (1968)), 0.1 mg/l 2,4-D, 0.1 mg/l 6-furfurylaminopurine and 750 μg/ml MgCL2, and with 50 to 100 μg/ml cefotaxime and 400-500 μg/ml carbenicillin to kill residual bacteria. Individual cell lines are isolated after two to three months (with subcultures every four to six weeks) and are further cultivated on selective medium for tissue amplification (30° C., 16 hr photoperiod). Transformed tissues are subsequently further cultivated on non-selective medium during 2 to 3 months to give rise to somatic embryos. Healthy looking embryos of at least 4 mm length are transferred to tubes with SH medium in fine vermiculite, supplemented with 0.1 mg/l indole acetic acid, 6 furfurylaminopurine and gibberellic acid. The embryos are cultivated at 30° C. with a photoperiod of 16 hrs, and plantlets at the 2 to 3 leaf stage are transferred to pots with vermiculite and nutrients. The plants are hardened and subsequently moved to the greenhouse for further cultivation.

### Example 10

### Phenotypic Evaluation Procedure

[0803] 1. Evaluation Setup

[0804] Approximately 35 independent T0 rice transformants were generated. The primary transformants were transferred from a tissue culture chamber to a greenhouse for growing and harvest of T1 seed. Six events, of which the T1 progeny segregated 3:1 for presence/absence of the transgene, were retained. For each of these events, approximately 10 T1 seedlings containing the transgene (hetero- and homo-zygotes) and approximately 10 T1 seedlings lacking the transgene (nullizygotes) were selected by monitoring visual marker expression. The transgenic plants and the corresponding nullizygotes were grown side-by-side at random positions. Greenhouse conditions were of shorts days (12 hours light), 28° C. in the light and 22° C. in the dark, and a relative humidity of 70%. Plants grown under non-stress conditions were watered at regular intervals to ensure that water and nutrients were not limiting and to satisfy plant needs to complete growth and development.

[0805] From the stage of sowing until the stage of maturity the plants were passed several times through a digital imaging cabinet. At each time point digital images (2048×1536 pixels, 16 million colours) were taken of each plant from at least 6 different angles.

[0806] T1 events can be further evaluated in the T2 generation following the same evaluation procedure as for the T1 generation, e.g. with less events and/or with more individuals per event.

[0807] Drought Screen

[0808] Plants from T2 seeds are grown in potting soil under normal conditions until they approached the heading stage. They are then transferred to a “dry” section where irrigation is withheld. Humidity probes are inserted in randomly chosen pots to monitor the soil water content (SWC). When SWC goes below certain thresholds, the plants are automatically re-watered continuously until a normal level is reached again. The plants are then re-transferred again to normal conditions. The rest of the cultivation (plant maturation, seed harvest) is the same as for plants not grown under abiotic stress conditions. Growth and yield parameters are recorded as detailed for growth under normal conditions.

[0809] Nitrogen Use Efficiency Screen

[0810] Rice plants from T2 seeds are grown in potting soil under normal conditions except for the nutrient solution. The pots are watered from transplantation to maturation with a specific nutrient solution containing reduced N nitrogen (N) content, usually between 7 to 8 times less. The rest of the cultivation (plant maturation, seed harvest) is the same as for plants not grown under abiotic stress. Growth and yield parameters are recorded as detailed for growth under normal conditions.

[0811] Salt Stress Screen

[0812] Plants are grown on a substrate made of coco fibers and argex (3 to 1 ratio). A normal nutrient solution is used during the first two weeks after transplanting the plantlets in the greenhouse. After the first two weeks, 25 mM of salt (NaCl) is added to the nutrient solution, until the plants are harvested. Seed-related parameters are then measured.

[0813] 2. Statistical Analysis: F Test

[0814] A two factor ANOVA (analysis of variants) was used as a statistical model for the overall evaluation of plant phenotypic characteristics. An F test was carried out on all the parameters measured of all the plants of all the events transformed with the gene of the present invention. The F test was carried out to check for an effect of the gene over all the transformation events and to verify for an overall effect of the gene, also known as a global gene effect. The threshold for significance for a true global gene effect was set at a 5% probability level for the F test. A significant F test value points to a gene effect, meaning that it is not only the mere presence or position of the gene that is causing the differences in phenotype.

[0815] 3. Parameters Measured

[0816] From the stage of sowing until the stage of maturity the plants were passed several times through a digital imaging cabinet. At each time point digital images (2048×1536 pixels, 16 million colours) were taken of each plant from at least 6 different angles as described in WO2010/031780. These measurements were used to determine different parameters.

[0817] Biomass-Related Parameter Measurement

[0818] The plant aboveground area (or leafy biomass) was determined by counting the total number of pixels on the digital images from aboveground plant parts discriminated from the background. This value was averaged for the pictures taken on the same time point from the different angles and was converted to a physical surface value expressed in square mm by calibration. Experiments show that the aboveground plant area measured this way correlates with the biomass of plant parts above ground. The above ground area is the area measured at the time point at which the plant had reached its maximal leafy biomass. The early vigour is the plant (seedling) aboveground area three weeks post-germination. Increase in root biomass is expressed as an increase in total root biomass (measured as maximum biomass of roots observed during the lifespan of a plant); or as an increase in the root/shoot index (measured as the ratio between root mass and shoot mass in the period of active growth of root and shoot).

[0819] Parameters Related to Development Time

[0820] The early vigour is the plant (seedling) aboveground area three weeks post-germination. Early vigour was determined by counting the total number of pixels from aboveground plant parts discriminated from the background. This value was averaged for the pictures taken on the same time point from different angles and was converted to a physical surface value expressed in square mm by calibration.

[0821] AreaEmer is an indication of quick early development (when decreased compared to control plants). It is the ratio (expressed in %) between the time a plant needs to make 30% of the final biomass and the time the plants needs to make 90% of its final biomass.

[0822] The “flowering time” of the plant can be determined using the method as described in WO 2007/093444.

[0823] Seed-Related Parameter Measurements

[0824] The mature primary panicles were harvested, counted, bagged, barcode-labelled and then dried for three days in an oven at 37° C. The panicles were then threshed and all the seeds were collected and counted. The filled husks were separated from the empty ones using an air-blowing device. The empty husks were discarded and the remaining fraction was counted again. The filled husks were weighed on an analytical balance. The number of filled seeds was determined by counting the number of filled husks that remained after the separation step. The total seed yield was measured by weighing all filled husks harvested from a plant. Total seed number per plant was measured by counting the number of husks harvested from a plant. Thousand Kernel Weight (TKW) is extrapolated from the number of filled seeds counted and their total weight. The Harvest Index (HI) in the present invention is defined as the ratio between the total seed yield and the above ground area (mm²), multiplied by a factor 10⁶. The total number of flowers per panicle as defined in the present invention is the ratio between the total number of seeds and the number of mature primary panicles. The seed fill rate as defined in the present invention is the proportion (expressed as a %) of the number of filled seeds over the total number of seeds (or florets).

[0825] Root biomass can be determined using a method as described in WO 2006/029987.

### Example 11

### Results of the Phenotypic Evaluation of the Transgenic Plants

[0826] 1. Loss of Timing of ET and JA Biosynthesis 1 (LEJ1) Polypeptides

[0827] The results of the evaluation of transgenic rice plants expressing a nucleic acid encoding the LEJ1 polypeptide of SEQ ID NO: 2 under non-stress conditions are presented below. An increase of more than 5% was observed for fill rate and harvest index.

TABLE E1
Data summary for transgenic rice plants; for each parameter,
the overall percent increase is shown for the confirmation
(T2 generation), for each parameter the p-value is <0.05.

| Parameter | Overall increase |
|---|---|
| fillrate | 15.6 |
| harvestindex | 11.9 |

[0828] In addition, 2 lines expressing an LEJ1 nucleic acid showed a faster growth rate (decreased AreaEmer) and another line showed increased biomass (increased height (HeightMax and GravityYMax) and increased root growth (RootThickMax)).

[0829] 2. ExbB Polypeptides

[0830] Results of the Phenotypic Evaluation of the Transgenic Rice Plants Comprising the Nucleic Acid Sequence Encoding an ExbB Polypeptide Under the Control of a Constitutive Promoter

[0831] The results of the evaluation of transgenic rice plants in the T1 generation and expressing a nucleic acid comprising the longest Open Reading Frame in SEQ ID NO: 211 under non-stress conditions are presented below. See previous Examples for details on the generations of the transgenic plants.

[0832] The results of the evaluation of transgenic rice plants in the T1 generation and expressing a nucleic acid encoding the ExbB polypeptide of SEQ ID NO: 212, by use of the pGOS2::ExbB vector, under non-stress conditions are presented hereafter. When grown under non-stress conditions, an increase of at least 5% was observed for number of filled seeds, i.e. fillrate (see Table E2). Furthermore, the transgenic plants also showed in I line a significant increase, i.e. more than 5% increase and p-value <0.05, in total weight of seeds, number of filled seeds, and harvest index. Another two lines showed a positive trend, i.e. an increase of more than 5%, but p-value >0.05, for total weight seeds and harvest index.

TABLE E2
Data summary for transgenic rice plants; for each parameter,
the overall percent increase is shown for the T1 generation,
for each parameter the p-value is <0.05.

| Parameter | Overall increase |
|---|---|
| fillrate | 13.3 |

[0833] Results of the Phenotypic Evaluation of the Transgenic Rice Plants Comprising the Nucleic Acid Sequence Encoding an ExbB Polypeptide Under the Control of a Root Specific Promoter

[0834] The results of the evaluation of transgenic rice plants in the T1 generation and expressing a nucleic acid comprising the longest Open Reading Frame in SEQ ID NO: 211 under non-stress conditions are presented below. See previous Examples for details on the generations of the transgenic plants.

[0835] The results of the evaluation of transgenic rice plants in the T1 generation and expressing a nucleic acid encoding the ExbB polypeptide of SEQ ID NO: 212, by use of the pRs::ExbB vector, under non-stress conditions are presented hereafter. When grown under non-stress conditions, an increase of at least 5% was observed for number of filled seeds, i.e. fillrate (see Table E3). Furthermore, the transgenic plants also showed in 2 lines a significant increase, i.e. more than 5% increase and p-value <0.05, in total thousand kernel weight, also called TKW. I line of the transgenic lines showing the increased fillrate, also showed a significant increase in harvest index. 3 lines of the transgenic lines showing increased fillrate also showed a positive trend in number of filled seeds and early vigour. Another two lines showed a positive trend, i.e. an increase of more than 5%, but p-value >0.05, for harvest index.

TABLE E3
Data summary for transgenic rice plants; for each parameter,
the overall percent increase is shown for T1 generation,
for each parameter the p-value is <0.05.

| Parameter | Overall increase |
|---|---|
| fillrate | 8.8 |

[0836] 3. NMPRT Polypeptides

[0837] The results of the evaluation of transgenic rice plants in the T1 generation and expressing a nucleic acid comprising SEQ ID NO: 281 under non-stress conditions are presented below. See above for details on the generations of the transgenic plants.

[0838] An increase of more than 5% (at a p value of p<0.05) in the transgenic plants as compared to control plants was observed for several parameters including root/shoot index, total seed yield, fill rate, number of flowers per panicle, number of filed seeds, and of more than 3 (at a p value of p<0.05) for thousand kernel weight. The fill rate is an indication of the filling of the seeds and is the proportion (expressed as %) of the number of filled seeds over the number of florets.

[0839] The results of one experiment are presented hereunder in Table E4.

TABLE E4
Data summary for transgenic rice plants; for each parameter,
the overall percent increase is shown (T1 generation),
for each parameter the p-value is <0.05.

| | Overall increase |
|---|---|
| Parameter | as compared to control plants |
| Fill rate | 14.2 |
| Flowers per panicle | 7.3 |
| Thousand kernel weight | 4 |
| Root/shoot index | 5.3 |

[0840] An increase was observed for root/shoot index, fill rate, number of flowers per panicle, and thousand-kernel weight (TKW). For one event transgenic plants even showed a 34% increase in total seed yield as compared to control plants, and an increase of 35% of the number of filed seeds as compared to control plants.

### Example 12

### Identification of Sequences Related to SEQ ID NO: 328 and SEQ ID NO: 329

[0841] Sequences (full length cDNA, ESTs or genomic) related to SEQ ID NO: 329 and SEQ ID NO: 329 were identified amongst those maintained in the Entrez Nucleotides database at the National Center for Biotechnology Information (NCBI) using database sequence search tools, such as the Basic Local Alignment Tool (BLAST) (Altschul et al. (1990) J. Mol. Biol. 215:403-410; and Altschul et al. (1997) Nucleic Acids Res. 25:3389-3402). The program is used to find regions of local similarity between sequences by comparing nucleic acid or polypeptide sequences to sequence databases and by calculating the statistical significance of matches. For example, the polypeptide encoded by the nucleic acid of SEQ ID NO: 328 was used for the TBLASTN algorithm, with default settings and the filter to ignore low complexity sequences set off. The output of the analysis was viewed by pairwise comparison, and ranked according to the probability score (E-value), where the score reflect the probability that a particular alignment occurs by chance (the lower the E-value, the more significant the hit). In addition to E-values, comparisons were also scored by percentage identity. Percentage identity refers to the number of identical nucleotides (or amino acids) between the two compared nucleic acid (or polypeptide) sequences over a particular length. In some instances, the default parameters may be adjusted to modify the stringency of the search. For example the E-value may be increased to show less stringent matches. This way, short nearly exact matches may be identified.

[0842] Table F provides a list of nucleic acid sequences related to SEQ ID NO: 328 and SEQ ID NO: 329.

TABLE F
Examples of AP2-26-like nucleic acids and polypeptides:

| | Nucleic | |
|---|---|---|
| | acid | Protein |
| | SEQ ID | SEQ ID |
| Plant Source | NO: | NO: |
| LOC_Os08g31580 (AP2-26 SEQ ID NO: 329) | 328 | 329 |
| A. thaliana_AT1G78080.1#1 | 330 | 331 |
| B. napus_TC65671#1 | 332 | 333 |
| B. napus_TC90095#1 | 334 | 335 |
| B. napus_TC92126#1 | 336 | 337 |
| G. max_GMO6MC30458_sf81e08@29754#1 | 338 | 339 |
| H. vulgare_TC185981#1 | 340 | 341 |
| O. sativa_LOC_Os02g51670.1#1 | 342 | 343 |
| O. sativa_LOC_Os09g20350.1#1 | 344 | 345 |
| P. trichocarpa_798748#1 | 346 | 347 |
| P. trichocarpa_scaff_V.168#1 | 348 | 349 |
| P. trichocarpa_TC99525#1 | 350 | 351 |
| T. aestivum_c50843809@10011#1 | 352 | 353 |
| T. aestivum_TC277143#1 | 354 | 355 |
| T. aestivum_TC300618#1 | 356 | 357 |
| T. aestivum_TC315204#1 | 358 | 359 |
| Z. mays_TA17892_4577999#1 | 360 | 361 |
| Z. mays_TC478294#1 | 362 | 363 |
| Z. mays_TC488418#1 | 364 | 365 |
| Z. mays_TC501784#1 | 366 | 367 |
| Zea_mays_GRMZM2G003466_T01#1 | 368 | 369 |
| Zea_mays_GRMZM2G039870_T01#1 | 370 | 371 |
| Zea_mays_GRMZM2G061487_T01#1 | 372 | 373 |
| Zea_mays_GRMZM2G061487_T02#1 | 374 | 375 |
| Zea_mays_GRMZM2G113060_T01#1 | 376 | 377 |

[0843] Sequences have been tentatively assembled and publicly disclosed by research institutions, such as The Institute for Genomic Research (TIGR; beginning with TA). For instance, the Eukaryotic Gene Orthologs (EGO) database may be used to identify such related sequences, either by keyword search or by using the BLAST algorithm with the nucleic acid sequence or polypeptide sequence of interest. Special nucleic acid sequence databases have been created for particular organisms, e.g. for certain prokaryotic organisms, such as by the Joint Genome Institute. Furthermore, access to proprietary databases, has allowed the identification of novel nucleic acid and polypeptide sequences.

### Example 13

### Alignment of AP2-26-Like Polypeptide Sequences

[0844] Alignment of polypeptide sequences was performed using the ClustalW 2.0 algorithm of progressive alignment (Thompson et al. (1997) Nucleic Acids Res 25:4876-4882; Chema et al. (2003). Nucleic Acids Res 31:3497-3500) with standard setting (slow alignment, similarity matrix: Gonnet, gap opening penalty 10, gap extension penalty: 0.2). Minor manual editing was done to further optimise the alignment. The AP2-26-like polypeptides are aligned in FIG. 16.

[0845] A phylogenetic tree of AP2-26-like polypeptides (FIG. 17) was constructed by aligning AP2-26-like sequences using MAFFT (Katoh and Toh (2008)—Briefings in Bioinformatics 9:286-298). A neighbour-joining tree was calculated using Quick-Tree (Howe et al. (2002), Bioinformatics 18(11): 1546-7), 100 bootstrap repetitions. The dendrogram was drawn using Dendroscope (Huson et al. (2007), BMC Bioinformatics 8(1):460). Confidence levels for 100 bootstrap repetitions are indicated for major branchings.

### Example 14

### Calculation of Global Percentage Identity Between Polypeptide Sequences

[0846] Global percentages of similarity and identity between full length polypeptide sequences useful in performing the methods of the invention were determined using one of the methods available in the art, the MatGAT (Matrix Global Alignment Tool) software (BMC Bioinformatics. 2003 4:29. MatGAT: an application that generates similarity/identity matrices using protein or DNA sequences. Campanella J J, Bitincka L, Smalley J; software hosted by Ledion Bitincka). MatGAT software generates similarity/identity matrices for DNA or protein sequences without needing pre-alignment of the data. The program performs a series of pair-wise alignments using the Myers and Miller global alignment algorithm (with a gap opening penalty of 12, and a gap extension penalty of 2), calculates similarity and identity using for example Blosum 62 (for polypeptides), and then places the results in a distance matrix.

[0847] Results of the analysis are shown in FIG. 18 for the global similarity and identity over the full length of the polypeptide sequences. Sequence similarity is shown in the bottom half of the dividing line and sequence identity is shown in the top half of the diagonal dividing line. Parameters used in the comparison were: Scoring matrix: Blosum62, First Gap: 12, Extending Gap: 2. The sequence identity (in %) between the AP2-26-like polypeptide sequences useful in performing the methods of the invention can be as low as 36 compared to SEQ ID NO: 329.

### Example 15

### Identification of Domains Comprised in Polypeptide Sequences Useful in Performing the Methods of the Invention

[0848] The Integrated Resource of Protein Families, Domains and Sites (InterPro) database is an integrated interface for the commonly used signature databases for text- and sequence-based searches. The InterPro database combines these databases, which use different methodologies and varying degrees of biological information about well-characterized proteins to derive protein signatures. Collaborating databases include SWISS-PROT, PROSITE, TrEMBL, PRINTS, Propom and Pfam, Smart and TIGRFAMs. Pfam is a large collection of multiple sequence alignments and hidden Markov models covering many common protein domains and families. Pfam is hosted at the Sanger Institute server in the United Kingdom. Interpro is hosted at the European Bioinformatics Institute in the United Kingdom.

[0849] The results of the InterPro scan (InterPro database, release 28) of the polypeptide sequence as represented by SEQ ID NO: 329 are presented in Table G.

TABLE G
InterPro scan results (major accession numbers) of the
polypeptide sequence as represented by SEQ ID NO: 329.

| | | | Amino acid |
|---|---|---|---|
| | | | coordinates on |
| | Accession | Accession | SEQ ID |
| Database | number | name | NO 329 |
| Prints | PR00367 | ETHRSPELEMNT | T[104-115] |
| | | | T[126-142] |
| Gene3D | G3DSA:3.30.730.10 | TF_ERF | T[102-163] |
| Pfam | PF00847 | AP2 | T[104-152] |
| Smart | SM00380 | AP2 | T[103-166] |
| Profile | PS51032 | AP2_ERF | T[103-160] |
| superfamily | SSF54171 | DNA-binding_ | T[102-163] |
| | | integrase-type | |

[0850] In an embodiment an AP2-26-like polypeptide comprises a conserved domain (or motif) with at least 70%, 71%, 72%, 73%, 74%, 75%, 76%, 77%, 78%, 79%, 80%, 81%, 82%, 83%, 84%, 85%, 86%, 87%, 88%, 89%, 90%, 91%, 92%, 93%, 94%, 95%, 96%, 97%, 98%, or 99% sequence identity to a conserved domain from amino acid 104 to 152 in SEQ ID NO:329).

### Example 16

### Topology Prediction of the AP2-26-Like Polypeptide Sequences

[0851] TargetP 1.1 predicts the subcellular location of eukaryotic proteins. The location assignment is based on the predicted presence of any of the N-terminal pre-sequences: chloroplast transit peptide (cTP), mitochondrial targeting peptide (mTP) or secretory pathway signal peptide (SP). Scores on which the final prediction is based are not really probabilities, and they do not necessarily add to one. However, the location with the highest score is the most likely according to TargetP, and the relationship between the scores (the reliability class) may be an indication of how certain the prediction is. The reliability class (RC) ranges from 1 to 5, where 1 indicates the strongest prediction. TargetP is maintained at the server of the Technical University of Denmark.

[0852] For the sequences predicted to contain an N-terminal presequence a potential cleavage site can also be predicted.

[0853] A number of parameters were selected, such as organism group (non-plant or plant), cutoff sets (none, predefined set of cutoffs, or user-specified set of cutoffs), and the calculation of prediction of cleavage sites (yes or no).

[0854] The results of TargetP 1.1 analysis of the polypeptide sequence as represented by SEQ ID NO: 329 are presented Table H. The “plant” organism group has been selected, no cutoffs defined, and the predicted length of the transit peptide requested. The subcellular localization of the polypeptide sequence as represented by SEQ ID NO: 329 may be the cytoplasm or nucleus, no transit peptide is predicted.

TABLE H
TargetP 1.1 analysis of the polypeptide sequence as represented by SEQ ID NO: 329.

| Name | Len | cTP | mTP | SP | other | Loc | RC | TPlen |
|---|---|---|---|---|---|---|---|---|
| SEQ ID NO: 2 | 280 | 0.399 | 0.076 | 0.035 | 0.684 | — | 4 | — |
| cutoff | | 0.000 | 0.000 | 0.000 | 0.000 | | | |

Abbreviations: Len, Length; cTP, Chloroplastic transit peptide; mTP, Mitochondrial transit peptide, SP, Secretory pathway signal peptide, other, Other subcellular targeting, Loc, Predicted Location; RC, Reliability class; TPlen, Predicted transit peptide length.

[0855] Many other algorithms can be used to perform such analyses, including:
[0856] ChloroP 1.1 hosted on the server of the Technical University of Denmark;
[0857] Protein Prowler Subcellular Localisation Predictor version 1.2 hosted on the server of the Institute for Molecular Bioscience, University of Queensland, Brisbane, Australia;
[0858] PENCE Proteome Analyst PA-GOSUB 2.5 hosted on the server of the University of Alberta, Edmonton, Alberta, Canada;
[0859] TMHMM, hosted on the server of the Technical University of Denmark
[0860] PSORT (URL: psort.org)
[0861] PLOC (Park and Kanehisa, Bioinformatics, 19, 1656-1663, 2003).

### Example 17

### Functional Assay for the AP2-26-Like Polypeptide

[0862] Sakuma et al. (Bioch. Biophys. Res. Comm. 290: 998-1009, 2002) describe a gel mobility assay for assessing the functionality of AP2/ERF domains in DREB transcription factors. Persons skilled in the art are familiar with techniques for assaying DNA binding activity of transcription factors, as well as their capability of promoting transcription.

### Example 18

### Cloning of the AP2-26-Like Encoding Nucleic Acid Sequence

[0863] The nucleic acid sequence encoding the AP2-26-like polypeptide was isolated using standard protocols and cloned into a Gateway® entry vector.

[0864] The entry clone comprising SEQ ID NO: 328 was then used in an LR reaction with a destination vector used for Oryza sativa transformation. This vector contained as functional elements within the T-DNA borders: a plant selectable marker; a screenable marker expression cassette; and a Gateway cassette intended for LR in vivo recombination with the nucleic acid sequence of interest already cloned in the entry clone. A rice RCc3 promoter (SEQ ID NO: 382) for root specific expression was located upstream of this Gateway cassette. After the LR recombination step, the resulting expression vector pRCc3::AP2-26-like (FIG. 19) was transformed into Agrobacterium strain LBA4044 according to methods well known in the art. In a similar way, the nucleic acid sequence encoding the AP2-26-like polypeptide was cloned into a destination vector with the rice GOS2 promoter and transformed into Agrobacterium.

### Example 19

### Plant Transformation

[0865] Rice Transformation

[0866] The Agrobacterium containing the expression vector was used to transform Oryza sativa plants. Mature dry seeds of the rice japonica cultivar Nipponbare were dehusked. Sterilization was carried out by incubating for one minute in 70% ethanol, followed by 30 minutes in 0.2% HgCl₂, followed by a 6 times 15 minutes wash with sterile distilled water. The sterile seeds were then germinated on a medium containing 2,4-D (callus induction medium). After incubation in the dark for four weeks, embryogenic, scutellum-derived calli were excised and propagated on the same medium. After two weeks, the calli were multiplied or propagated by subculture on the same medium for another 2 weeks. Embryogenic callus pieces were sub-cultured on fresh medium 3 days before co-cultivation (to boost cell division activity).

[0867] Agrobacterium strain LBA4404 containing the expression vector was used for co-cultivation. Agrobacterium was inoculated on AB medium with the appropriate antibiotics and cultured for 3 days at 28° C. The bacteria were then collected and suspended in liquid co-cultivation medium to a density (OD₆₀₀) of about 1. The suspension was then transferred to a Petri dish and the calli immersed in the suspension for 15 minutes. The callus tissues were then blotted dry on a filter paper and transferred to solidified, co-cultivation medium and incubated for 3 days in the dark at 25° C. Co-cultivated calli were grown on 2,4-D-containing medium for 4 weeks in the dark at 28° C. in the presence of a selection agent. During this period, rapidly growing resistant callus islands developed. After transfer of this material to a regeneration medium and incubation in the light, the embryogenic potential was released and shoots developed in the next four to five weeks. Shoots were excised from the calli and incubated for 2 to 3 weeks on an auxin-containing medium from which they were transferred to soil. Hardened shoots were grown under high humidity and short days in a greenhouse.

[0868] Approximately 35 independent T0 rice transformants were generated for one construct. The primary transformants were transferred from a tissue culture chamber to a greenhouse.

[0869] After a quantitative PCR analysis to verify copy number of the T-DNA insert, only single copy transgenic plants that exhibit tolerance to the selection agent were kept for harvest of T1 seed. Seeds were then harvested three to five months after transplanting. The method yielded single locus transformants at a rate of over 50% (Aldemita and Hodges1996, Chan et al. 1993, Hiei et al. 1994).

### Example 20

### Transformation of Other Crops

[0870] Corn Transformation

[0871] Transformation of maize (Zea mays) is performed with a modification of the method described by Ishida et al. (1996) Nature Biotech 14(6): 745-50. Transformation is genotype-dependent in corn and only specific genotypes are amenable to transformation and regeneration. The inbred line A188 (University of Minnesota) or hybrids with A188 as a parent are good sources of donor material for transformation, but other genotypes can be used successfully as well. Ears are harvested from corn plant approximately 11 days after pollination (DAP) when the length of the immature embryo is about 1 to 1.2 mm. Immature embryos are cocultivated with Agrobacterium tumefaciens containing the expression vector, and transgenic plants are recovered through organogenesis. Excised embryos are grown on callus induction medium, then maize regeneration medium, containing the selection agent (for example imidazolinone but various selection markers can be used). The Petri plates are incubated in the light at 25° C. for 2-3 weeks, or until shoots develop. The green shoots are transferred from each embryo to maize rooting medium and incubated at 25° C. for 2-3 weeks, until roots develop. The rooted shoots are transplanted to soil in the greenhouse. T1 seeds are produced from plants that exhibit tolerance to the selection agent and that contain a single copy of the T-DNA insert.

[0872] Wheat Transformation

[0873] Transformation of wheat is performed with the method described by Ishida et al. (1996) Nature Biotech 14(6): 745-50. The cultivar Bobwhite (available from CIMMYT, Mexico) is commonly used in transformation. Immature embryos are co-cultivated with Agrobacterium tumefaciens containing the expression vector, and transgenic plants are recovered through organogenesis. After incubation with Agrobacterium, the embryos are grown in vitro on callus induction medium, then regeneration medium, containing the selection agent (for example imidazolinone but various selection markers can be used). The Petri plates are incubated in the light at 25° C. for 2-3 weeks, or until shoots develop. The green shoots are transferred from each embryo to rooting medium and incubated at 25° C. for 2-3 weeks, until roots develop. The rooted shoots are transplanted to soil in the greenhouse. T1 seeds are produced from plants that exhibit tolerance to the selection agent and that contain a single copy of the T-DNA insert.

[0874] Soybean Transformation

[0875] Soybean is transformed according to a modification of the method described in the Texas A&M U.S. Pat. No. 5,164,310. Several commercial soybean varieties are amenable to transformation by this method. The cultivar Jack (available from the Illinois Seed foundation) is commonly used for transformation. Soybean seeds are sterilised for in vitro sowing. The hypocotyl, the radicle and one cotyledon are excised from seven-day old young seedlings. The epicotyl and the remaining cotyledon are further grown to develop axillary nodes. These axillary nodes are excised and incubated with Agrobacterium tumefaciens containing the expression vector. After the cocultivation treatment, the explants are washed and transferred to selection media. Regenerated shoots are excised and placed on a shoot elongation medium. Shoots no longer than 1 cm are placed on rooting medium until roots develop. The rooted shoots are transplanted to soil in the greenhouse. T1 seeds are produced from plants that exhibit tolerance to the selection agent and that contain a single copy of the T-DNA insert.

[0876] Rapeseed/Canola Transformation

[0877] Cotyledonary petioles and hypocotyls of 5-6 day old young seedling are used as explants for tissue culture and transformed according to Babic et al. (1998, Plant Cell Rep 17: 183-188). The commercial cultivar Westar (Agriculture Canada) is the standard variety used for transformation, but other varieties can also be used. Canola seeds are surface-sterilized for in vitro sowing. The cotyledon petiole explants with the cotyledon attached are excised from the in vitro seedlings, and inoculated with Agrobacterium (containing the expression vector) by dipping the cut end of the petiole explant into the bacterial suspension. The explants are then cultured for 2 days on MSBAP-3 medium containing 3 mg/l BAP, 3% sucrose, 0.7 Phytagar at 23° C., 16 hr light. After two days of co-cultivation with Agrobacterium, the petiole explants are transferred to MSBAP-3 medium containing 3 mg/l BAP, cefotaxime, carbenicillin, or timentin (300 mg/l) for 7 days, and then cultured on MSBAP-3 medium with cefotaxime, carbenicillin, or timentin and selection agent until shoot regeneration. When the shoots are 5-10 mm in length, they are cut and transferred to shoot elongation medium (MSBAP-0.5, containing 0.5 mg/l BAP). Shoots of about 2 cm in length are transferred to the rooting medium (MS0) for root induction. The rooted shoots are transplanted to soil in the greenhouse. T1 seeds are produced from plants that exhibit tolerance to the selection agent and that contain a single copy of the T-DNA insert.

[0878] Alfalfa Transformation

[0879] A regenerating clone of alfalfa (Medicago sativa) is transformed using the method of (McKersie et al., 1999 Plant Physiol 119: 839-847). Regeneration and transformation of alfalfa is genotype dependent and therefore a regenerating plant is required. Methods to obtain regenerating plants have been described. For example, these can be selected from the cultivar Rangelander (Agriculture Canada) or any other commercial alfalfa variety as described by Brown D C W and A Atanassov (1985. Plant Cell Tissue Organ Culture 4: 111-112). Alternatively, the RA3 variety (University of Wisconsin) has been selected for use in tissue culture (Walker et al., 1978 Am J Bot 65:654-659). Petiole explants are cocultivated with an overnight culture of Agrobacterium tumefaciens C58C1 pMP90 (McKersie et al., 1999 Plant Physiol 119: 839-847) or LBA4404 containing the expression vector. The explants are cocultivated for 3 d in the dark on SH induction medium containing 288 mg/L Pro, 53 mg/L thioproline, 4.35 g/L K2SO4, and 100 μm acetosyringinone. The explants are washed in half-strength Murashige-Skoog medium (Murashige and Skoog, 1962) and plated on the same SH induction medium without acetosyringinone but with a suitable selection agent and suitable antibiotic to inhibit Agrobacterium growth. After several weeks, somatic embryos are transferred to BOi2Y development medium containing no growth regulators, no antibiotics, and 50 g/L sucrose. Somatic embryos are subsequently germinated on half-strength Murashige-Skoog medium. Rooted seedlings were transplanted into pots and grown in a greenhouse. T1 seeds are produced from plants that exhibit tolerance to the selection agent and that contain a single copy of the T-DNA insert.

[0880] Cotton Transformation

[0881] Cotton is transformed using Agrobacterium tumefaciens according to the method described in U.S. Pat. No. 5,159,135. Cotton seeds are surface sterilised in 3% sodium hypochlorite solution during 20 minutes and washed in distilled water with 500 μg/ml cefotaxime. The seeds are then transferred to SH-medium with 50 μg/ml benomyl for germination. Hypocotyls of 4 to 6 days old seedlings are removed, cut into 0.5 cm pieces and are placed on 0.8% agar. An Agrobacterium suspension (approx. 108 cells per ml, diluted from an overnight culture transformed with the gene of interest and suitable selection markers) is used for inoculation of the hypocotyl explants. After 3 days at room temperature and lighting, the tissues are transferred to a solid medium (1.6 g/l Gelrite) with Murashige and Skoog salts with B5 vitamins (Gamborg et al., Exp. Cell Res. 50:151-158 (1968)), 0.1 mg/l 2,4-D, 0.1 mg/l 6-furfurylaminopurine and 750 μg/ml MgCL2, and with 50 to 100 μg/ml cefotaxime and 400-500 μg/ml carbenicillin to kill residual bacteria. Individual cell lines are isolated after two to three months (with subcultures every four to six weeks) and are further cultivated on selective medium for tissue amplification (30° C., 16 hr photoperiod). Transformed tissues are subsequently further cultivated on non-selective medium during 2 to 3 months to give rise to somatic embryos. Healthy looking embryos of at least 4 mm length are transferred to tubes with SH medium in fine vermiculite, supplemented with 0.1 mg/l indole acetic acid, 6 furfurylaminopurine and gibberellic acid. The embryos are cultivated at 30° C. with a photoperiod of 16 hrs, and plantlets at the 2 to 3 leaf stage are transferred to pots with vermiculite and nutrients. The plants are hardened and subsequently moved to the greenhouse for further cultivation.

### Example 21

### Phenotypic Evaluation Procedure

[0882] 21.1 Evaluation Setup

[0883] 35 to 90 independent T0 rice transformants were generated. The primary transformants were transferred from a tissue culture chamber to a greenhouse for growing and harvest of T1 seed. Six events, of which the T1 progeny segregated 3:1 for presence/absence of the transgene, were retained. For each of these events, approximately 10 T1 seedlings containing the transgene (hetero- and homo-zygotes) and approximately 10 T1 seedlings lacking the transgene (nullizygotes) were selected by monitoring visual marker expression.

[0884] The transgenic plants and the corresponding nullizygotes were grown side-by-side at random positions. Greenhouse conditions were of shorts days (12 hours light), 28° C. in the light and 22° C. in the dark, and a relative humidity of 70%. Plants grown under non-stress conditions were watered at regular intervals to ensure that water and nutrients were not limiting and to satisfy plant needs to complete growth and development, unless they were used in a stress screen.

[0885] From the stage of sowing until the stage of maturity the plants were passed several times through a digital imaging cabinet. At each time point digital images (2048×1536 pixels, 16 million colours) were taken of each plant from at least 6 different angles.

[0886] T1 events can be further evaluated in the T2 generation following the same evaluation procedure as for the T1 generation, e.g. with less events and/or with more individuals per event.

[0887] Drought Screen

[0888] T1 or T2 plants are grown in potting soil under normal conditions until they approached the heading stage. They are then transferred to a “dry” section where irrigation is withheld. Soil moisture probes are inserted in randomly chosen pots to monitor the soil water content (SWC). When SWC goes below certain thresholds, the plants are automatically re-watered continuously until a normal level is reached again. The plants are then re-transferred again to normal conditions. The rest of the cultivation (plant maturation, seed harvest) is the same as for plants not grown under abiotic stress conditions. Growth and yield parameters are recorded as detailed for growth under normal conditions.

[0889] Nitrogen Use Efficiency Screen

[0890] T1 or T2 plants are grown in potting soil under normal conditions except for the nutrient solution. The pots are watered from transplantation to maturation with a specific nutrient solution containing reduced N nitrogen (N) content, usually between 7 to 8 times less. The rest of the cultivation (plant maturation, seed harvest) is the same as for plants not grown under abiotic stress. Growth and yield parameters are recorded as detailed for growth under normal conditions.

[0891] Salt Stress Screen

[0892] T1 or T2 plants are grown on a substrate made of coco fibers and particles of baked clay (Argex) (3 to 1 ratio). A normal nutrient solution is used during the first two weeks after transplanting the plantlets in the greenhouse. After the first two weeks, 25 mM of salt (NaCl) is added to the nutrient solution, until the plants are harvested. Growth and yield parameters are recorded as detailed for growth under normal conditions.

[0893] 21.2 Statistical Analysis: F Test

[0894] A two factor ANOVA (analysis of variants) was used as a statistical model for the overall evaluation of plant phenotypic characteristics. An F test was carried out on all the parameters measured of all the plants of all the events transformed with the gene of the present invention. The F test was carried out to check for an effect of the gene over all the transformation events and to verify for an overall effect of the gene, also known as a global gene effect. The threshold for significance for a true global gene effect was set at a 5% probability level for the F test. A significant F test value points to a gene effect, meaning that it is not only the mere presence or position of the gene that is causing the differences in phenotype.

[0895] 21.3 Parameters Measured

[0896] From the stage of sowing until the stage of maturity the plants were passed several times through a digital imaging cabinet. At each time point digital images (2048×1536 pixels, 16 million colours) were taken of each plant from at least 6 different angles as described in WO2010/031780. These measurements were used to determine different parameters.

[0897] Biomass-Related Parameter Measurement

[0898] The plant aboveground area (or leafy biomass) was determined by counting the total number of pixels on the digital images from aboveground plant parts discriminated from the background. This value was averaged for the pictures taken on the same time point from the different angles and was converted to a physical surface value expressed in square mm by calibration. Experiments show that the aboveground plant area measured this way correlates with the biomass of plant parts above ground. The above ground area is the area measured at the time point at which the plant had reached its maximal leafy biomass.

[0899] Increase in root biomass is expressed as an increase in total root biomass (measured as maximum biomass of roots observed during the lifespan of a plant); or as an increase in the root/shoot index, measured as the ratio between root mass and shoot mass in the period of active growth of root and shoot. In other words, the root/shoot index is defined as the ratio of the rapidity of root growth to the rapidity of shoot growth in the period of active growth of root and shoot. Root biomass can be determined using a method as described in WO 2006/029987.

[0900] Parameters Related to Development Time

[0901] The early vigour is the plant aboveground area three weeks post-germination. Early vigour was determined by counting the total number of pixels from aboveground plant parts discriminated from the background. This value was averaged for the pictures taken on the same time point from different angles and was converted to a physical surface value expressed in square mm by calibration.

[0902] AreaEmer is an indication of quick early development when this value is decreased compared to control plants. It is the ratio (expressed in %) between the time a plant needs to make 30% of the final biomass and the time needs to make 90% of its final biomass.

[0903] The “time to flower” or “flowering time” of the plant can be determined using the method as described in WO 2007/093444.

[0904] Seed-Related Parameter Measurements

[0905] The mature primary panicles were harvested, counted, bagged, barcode-labelled and then dried for three days in an oven at 37° C. The panicles were then threshed and all the seeds were collected and counted. The seeds are usually covered by a dry outer covering, the husk. The filled husks (herein also named filled florets) were separated from the empty ones using an air-blowing device. The empty husks were discarded and the remaining fraction was counted again. The filled husks were weighed on an analytical balance.

[0906] The total number of seeds was determined by counting the number of filled husks that remained after the separation step. The total seed weight was measured by weighing all filled husks harvested from a plant.

[0907] The total number of seeds (or florets) per plant was determined by counting the number of husks (whether filled or not) harvested from a plant.

[0908] Thousand Kernel Weight (TKW) is extrapolated from the number of seeds counted and their total weight.

[0909] The Harvest Index (HI) in the present invention is defined as the ratio between the total seed weight and the above ground area (mm²), multiplied by a factor 10⁶.

[0910] The number of flowers per panicle as defined in the present invention is the ratio between the total number of seeds over the number of mature primary panicles.

[0911] The “seed fill rate” or “seed filling rate” as defined in the present invention is the proportion (expressed as a %) of the number of filled seeds (i.e. florets containing seeds) over the total number of seeds (i.e. total number of florets). In other words, the seed filling rate is the percentage of florets that are filled with seed.

### Example 22

### Results of the Phenotypic Evaluation of the Transgenic Plants

[0912] The results of the evaluation of transgenic rice plants expressing an AP2-26-like nucleic acid under control of the RCc3 promoter in the yield screen are presented below. When grown under non-stress conditions, an increase of at least 5% was observed for emergence vigour (early vigour), fill rate and harvest index.

TABLE I
Data summary for transgenic rice plants; for each parameter,
the overall percent increase is shown for the confirmation
(T1 generation), for each parameter the p-value is <0.05.

| Parameter | Overall increase |
|---|---|
| EmerVigor | 15.4 |
| fillrate | 9.0 |
| harvestindex | 6.5 |

[0913] In addition, plants expressing an AP2-26-like nucleic acid had increased biomass (above ground biomass and root biomass), increased total seed weight, and increased Thousand Kernel Weight.

[0914] The increased Thousand Kernel Weight was also observed in transgenic rice plants expressing an AP2-26-like nucleic acid under control of the GOS2 promoter when tested in the yield screen.

### Example 23

### Identification of Sequences Related to SEQ ID NO: 384 and SEQ ID NO: 385

[0915] Sequences (full length cDNA, ESTs or genomic) related to SEQ ID NO: 384 and SEQ ID

[0916] NO: 385 were identified amongst those maintained in the Entrez Nucleotides database at the National Center for Biotechnology Information (NCBI) using database sequence search tools, such as the Basic Local Alignment Tool (BLAST) (Altschul et al. (1990) J. Mol. Biol. 215:403-410; and Altschul et al. (1997) Nucleic Acids Res. 25:3389-3402). The program is used to find regions of local similarity between sequences by comparing nucleic acid or polypeptide sequences to sequence databases and by calculating the statistical significance of matches. For example, the polypeptide encoded by the nucleic acid of SEQ ID NO: 384 was used for the TBLASTN algorithm, with default settings and the filter to ignore low complexity sequences set off. The output of the analysis was viewed by pairwise comparison, and ranked according to the probability score (E-value), where the score reflect the probability that a particular alignment occurs by chance (the lower the E-value, the more significant the hit). In addition to E-values, comparisons were also scored by percentage identity. Percentage identity refers to the number of identical nucleotides (or amino acids) between the two compared nucleic acid (or polypeptide) sequences over a particular length. In some instances, the default parameters may be adjusted to modify the stringency of the search. For example the E-value may be increased to show less stringent matches. This way, short nearly exact matches may be identified.

[0917] Table J provides a list of nucleic acid sequences related to SEQ ID NO: 384 and SEQ ID NO: 385.

TABLE J
Examples of HD8-like nucleic acids and polypeptides:

| | Nucleic | |
|---|---|---|
| | acid | Protein |
| | SEQ ID | SEQ ID |
| Plant Source | NO: | NO: |
| >O. sativa_LOC_Os08g19590.2 | 384 | 385 |
| >Medicago truncatula HD | 386 | 387 |
| >A. thaliana_AT5G52170.1 | 388 | 389 |
| >A. thaliana_AT4G04890.1 | 390 | 391 |
| >A. thaliana_AT4G00730.2 | 392 | 393 |
| >A. thaliana_AT1G79840.1 | 394 | 395 |
| >A. thaliana_AT2G32370.1 | 396 | 397 |
| >A. thaliana_AT4G25530.1 | 398 | 399 |
| >A. thaliana_AT3G61150.1 | 400 | 401 |
| >A. thaliana_AT1G17920.1 | 402 | 403 |
| >A. thaliana_AT1G73360.1 | 404 | 405 |
| >A. thaliana_AT1G05230.2 | 406 | 407 |
| >A. thaliana_AT1G05230.3 | 408 | 409 |
| >A. thaliana_AT4G00730.1 | 410 | 411 |
| >A. thaliana_AT4G21750.2 | 412 | 413 |
| >G. max_Glyma16g34350.1 | 414 | 415 |
| >G. max_Glyma10g38280.1 | 416 | 417 |
| >G. max_Glyma15g01960.1 | 418 | 419 |
| >G. max_Glyma09g40130.1 | 420 | 421 |
| >G. max_Glyma03g01860.1 | 422 | 423 |
| >G. max_Glyma13g38430.1 | 424 | 425 |
| >G. max_Glyma08g06190.1 | 426 | 427 |
| >G. max_Glyma09g29810.1 | 428 | 429 |
| >G. max_Glyma20g29580.1 | 430 | 431 |
| >G. max_Glyma11g00570.1 | 432 | 433 |
| >G. max_Glyma16g32130.1 | 434 | 435 |
| >G. max_Glyma06g46000.1 | 436 | 437 |
| >G. max_Glyma12g32050.1 | 438 | 439 |
| >G. max_Glyma12g10710.1 | 440 | 441 |
| >G. max_Glyma01g45070.1 | 442 | 443 |
| >G. max_Glyma05g33520.1 | 444 | 445 |
| >G. max_Glyma01g01850.1 | 446 | 447 |
| >G. max_Glyma13g43350.2 | 448 | 449 |
| >G. max_Glyma09g26600.1 | 450 | 451 |
| >G. max_Glyma10g39720.2 | 452 | 453 |
| >G. max_Glyma13g43350.1 | 454 | 455 |
| >G. max_Glyma18g45970.1 | 456 | 457 |
| >G. max_Glyma07g08340.1 | 458 | 459 |
| >G. max_Glyma09g34070.1 | 460 | 461 |
| >Hordeum_vulgare_PUT-169a-82273 | 462 | 463 |
| >M. truncatula_AC202466_12.4 | 464 | 465 |
| >M. truncatula_AC148764_30.5 | 466 | 467 |
| >M. truncatula_AC123975_4.5 | 468 | 469 |
| >M. truncatula_AC173288_41.5 | 470 | 471 |
| >M. truncatula_CT485796_15.4 | 472 | 473 |
| >O. sativa_LOC_Os08g08820.2 | 474 | 475 |
| >O. sativa_LOC_Os02g45250.1 | 476 | 477 |
| >O. sativa_LOC_Os04g48070.3 | 478 | 479 |
| >O. sativa_LOC_Os09g35760.2 | 480 | 481 |
| >O. sativa_LOC_Os10g42490.2 | 482 | 483 |
| >O. sativa_LOC_Os04g53540.3 | 484 | 485 |
| >O. sativa_LOC_Os06g10600.1 | 486 | 487 |
| >O. sativa_LOC_Os01g55549.1 | 488 | 489 |
| >O. sativa_LOC_Os04g53540.4 | 490 | 491 |
| >O. sativa_LOC_Os04g48070.2 | 492 | 493 |
| >O. sativa_LOC_Os08g19590.3 | 494 | 495 |
| >O. sativa_LOC_Os09g35760.1 | 496 | 497 |
| >O. sativa_LOC_Os08g04190.1 | 498 | 499 |
| >O. sativa_LOC_Os04g48070.1 | 500 | 501 |
| >P. trichocarpa_scaff_III.687 | 502 | 503 |
| >P. trichocarpa_scaff_29.235 | 504 | 505 |
| >P. trichocarpa_scaff_II.1438 | 506 | 507 |
| >P. trichocarpa_scaff_122.86 | 508 | 509 |
| >P. trichocarpa_scaff_XV.1195 | 510 | 511 |
| >P. trichocarpa_scaff_II.2114 | 512 | 513 |
| >P. trichocarpa_scaff_XII.63 | 514 | 515 |
| >P. trichocarpa_scaff_IV.76 | 516 | 517 |
| >P. trichocarpa_scaff_XII.1124 | 518 | 519 |
| >P. trichocarpa_scaff_XIV.211 | 520 | 521 |
| >P. trichocarpa_scaff_44.222 | 522 | 523 |
| >P. trichocarpa_scaff_XIV.993 | 524 | 525 |
| >P. trichocarpa_scaff_XI.213 | 526 | 527 |
| >Solanum_lycopersicum_GQ222185 | 528 | 529 |
| >P. trichocarpa_HB1-like | 530 | 531 |
| >T. aestivum_TC277292 | 532 | 533 |
| >Zea_mays_GRMZM2G122897_T01 | 534 | 535 |
| >Zea_mays_AC235534.1_FGT007 | 536 | 537 |
| >Zea_mays_GRMZM2G116658_T01 | 538 | 539 |
| >Zea_mays_GRMZM2G004957_T02 | 540 | 541 |
| >Zea_mays_GRMZM2G001289_T02 | 542 | 543 |
| >Zea_mays_GRMZM2G118063_T02 | 544 | 545 |
| >Zea_mays_GRMZM2G026643_T01 | 546 | 547 |
| >Zea_mays_GRMZM2G001289_T01 | 548 | 549 |
| >Zea_mays_GRMZM2G130442_T02 | 550 | 551 |
| >Zea_mays_GRMZM2G118063_T03 | 552 | 553 |
| >Zea_mays_GRMZM2G438260_T01 | 554 | 555 |
| >Zea_mays_GRMZM2G130442_T01 | 556 | 557 |
| >Zea_mays_GRMZM2G004334_T01 | 558 | 559 |
| >Zea_mays_GRMZM2G026643_T02 | 560 | 561 |

[0918] Sequences have been tentatively assembled and publicly disclosed by research institutions, such as The Institute for Genomic Research (TIGR; beginning with TA). For instance, the Eukaryotic Gene Orthologs (EGO) database may be used to identify such related sequences, either by keyword search or by using the BLAST algorithm with the nucleic acid sequence or polypeptide sequence of interest. Special nucleic acid sequence databases have been created for particular organisms, e.g. for certain prokaryotic organisms, such as by the Joint Genome Institute. Furthermore, access to proprietary databases, has allowed the identification of novel nucleic acid and polypeptide sequences.

### Example 24

### Alignment of HD8-Like Polypeptide Sequences

[0919] Alignment of polypeptide sequences was performed using the ClustalW 2.0 algorithm of progressive alignment (Thompson et al. (1997) Nucleic Acids Res 25:4876-4882; Chema et al. (2003). Nucleic Acids Res 31:3497-3500) with standard setting (slow alignment, similarity matrix: Gonnet, gap opening penalty 10, gap extension penalty: 0.2). Minor manual editing was done to further optimise the alignment. The HD8-like polypeptides are aligned in FIG. 21.

[0920] The phylogenetic tree of HD8-like polypeptides (FIG. 22) was constructed as described by Jain et al., 2008. Multiple sequence alignments of homeobox domain identified by smart from all the protein sequences were performed using clustalx, version 1.83. The unrooted phylogenetic trees were constructed by the Neighbourjoining method (Saitou & Nei, Mol Biol Evol 4, 406-425, 1987) and displayed using njplot (Perriere & Gouy, Biochimie 78, 364-369, 1996)

### Example 25

### Calculation of Global Percentage Identity Between Polypeptide Sequences

[0921] Global percentages of similarity and identity between full length polypeptide sequences useful in performing the methods of the invention were determined using one of the methods available in the art, the MatGAT (Matrix Global Alignment Tool) software (BMC Bioinformatics. 2003 4:29. MatGAT: an application that generates similarity/identity matrices using protein or DNA sequences. Campanella J J, Bitincka L, Smalley J; software hosted by Ledion Bitincka). MatGAT software generates similarity/identity matrices for DNA or protein sequences without needing pre-alignment of the data. The program performs a series of pair-wise alignments using the Myers and Miller global alignment algorithm (with a gap opening penalty of 12, and a gap extension penalty of 2), calculates similarity and identity using for example Blosum 62 (for polypeptides), and then places the results in a distance matrix.

[0922] Results of the analysis are shown in FIG. 23 for the global similarity and identity over the full length of the polypeptide sequences. Sequence similarity is shown in the bottom half of the dividing line and sequence identity is shown in the top half of the diagonal dividing line. Parameters used in the comparison were: Scoring matrix: Blosum62, First Gap: 12, Extending Gap: 2. The sequence identity (in %) between the HD8-like polypeptide sequences useful in performing the methods of the invention can be as low as 10.4% but is generally higher than 20% compared to SEQ ID NO: 385.

### Example 26

### Identification of Domains Comprised in Polypeptide Sequences Useful in Performing the Methods of the Invention

[0923] The Integrated Resource of Protein Families, Domains and Sites (InterPro) database is an integrated interface for the commonly used signature databases for text- and sequence-based searches. The InterPro database combines these databases, which use different methodologies and varying degrees of biological information about well-characterized proteins to derive protein signatures. Collaborating databases include SWISS-PROT, PROSITE, TrEMBL, PRINTS, Propom and Pfam, Smart and TIGRFAMs. Pfam is a large collection of multiple sequence alignments and hidden Markov models covering many common protein domains and families. Pfam is hosted at the Sanger Institute server in the United Kingdom. Interpro is hosted at the European Bioinformatics Institute in the United Kingdom.

[0924] The results of the InterPro scan (InterPro database, release 29.0) of the polypeptide sequence as represented by SEQ ID NO: 385 are presented in Table K.

TABLE K
InterPro scan results (major accession numbers) of the polypeptide
sequence as represented by SEQ ID NO: 385.

| Method | AccNumber | shortName | location |
|---|---|---|---|
| InterPro | IPR001356 | Homeobox | x |
| BlastProDom | PD000010 | Homeobox | T[60-117] |
| | | | 0.0 |
| FPrintScan | PR00024 | HOMEOBOX | T[98-108] |
| | | | 0.03 |
| | | | T[108-117] |
| | | | 0.03 |
| HMMPfam | PF00046 | Homeobox | T[62-118] |
| | | | 4.60E−19 |
| HMMSmart | SM00389 | HOX | T[61-123] |
| | | | 1.39E−17 |
| ProfileScan | PS50071 | HOMEOBOX_2 | T[59-119] |
| | | | 0.0 |
| InterPro | IPR002913 | Lipid-binding START | x |
| HMMPfam | PF01852 | START | T[265-500] |
| | | | 1.79E−26 |
| HMMSmart | SM00234 | START | T[254-500] |
| | | | 1.59E−12 |
| ProfileScan | PS50848 | START | T[245-503] |
| | | | 0.0 |
| InterPro | IPR009057 | Homeodomain-like | x |
| Superfamily | SSF46689 | Homeodomain_like | T[48-118] |
| | | | 1.9E−18 |
| InterPro | IPR012287 | Homeodomain-related | x |
| Gene3D | G3DSA:1.10.10.60 | Homeodomain-rel | T[28-124] |
| | | | 4.19E−15 |
| InterPro | NULL | NULL | x |
| HMMPanthe | PTHR19418 | PTHR19418 | T[36-155] |
| | | | 6.4E−15 |
| | | | T[36-279] |
| | | | 6.4E−15 |
| | | | T[248-279] |
| | | | 6.4E−15 |

[0925] In an embodiment an HD8-like polypeptide comprises a conserved domain (or motif) with at least 70%, 71%, 72%, 73%, 74%, 75%, 76%, 77%, 78%, 79%, 80%, 81%, 82%, 83%, 84%, 85%, 86%, 87%, 88%, 89%, 90%, 91%, 92%, 93%, 94%, 95%, 96%, 97%, 98%, or 99% sequence identity to a conserved domain from amino acid 265 to 500 in SEQ ID NO: 385).

### Example 27

### Topology Prediction of the HD8-Like Polypeptide Sequences

[0926] TargetP 1.1 predicts the subcellular location of eukaryotic proteins. The location assignment is based on the predicted presence of any of the N-terminal pre-sequences: chloroplast transit peptide (cTP), mitochondrial targeting peptide (mTP) or secretory pathway signal peptide (SP). Scores on which the final prediction is based are not really probabilities, and they do not necessarily add to one. However, the location with the highest score is the most likely according to TargetP, and the relationship between the scores (the reliability class) may be an indication of how certain the prediction is. The reliability class (RC) ranges from 1 to 5, where 1 indicates the strongest prediction. TargetP is maintained at the server of the Technical University of Denmark.

[0927] For the sequences predicted to contain an N-terminal presequence a potential cleavage site can also be predicted.

[0928] A number of parameters were selected, such as organism group (non-plant or plant), cutoff sets (none, predefined set of cutoffs, or user-specified set of cutoffs), and the calculation of prediction of cleavage sites (yes or no).

[0929] The results of TargetP 1.1 analysis of the polypeptide sequence as represented by SEQ ID NO: 385 are presented Table L. The “plant” organism group has been selected, no cutoffs defined, and the predicted length of the transit peptide requested.

TABLE L
TargetP 1.1 analysis of the polypeptide sequence as represented by SEQ ID NO: 329.

| Name | Len | cTP | mTP | SP | other | Loc | RC | TPlen |
|---|---|---|---|---|---|---|---|---|
| SEQ ID NO: 58 | 786 | 0.085 | 0.073 | 0.488 | 0.255 | S | 4 | 20 |
| cutoff | | 0.000 | 0.000 | 0.000 | 0.000 | | | |

Abbreviations: Len, Length; cTP, Chloroplastic transit peptide; mTP, Mitochondrial transit peptide, SP, Secretory pathway signal peptide, other, Other subcellular targeting, Loc, Predicted Location; RC, Reliability class; TPlen, Predicted transit peptide length.

[0930] Many other algorithms can be used to perform such analyses, including:
[0931] ChloroP 1.1 hosted on the server of the Technical University of Denmark;
[0932] Protein Prowler Subcellular Localisation Predictor version 1.2 hosted on the server of the Institute for Molecular Bioscience, University of Queensland, Brisbane, Australia;
[0933] PENCE Proteome Analyst PA-GOSUB 2.5 hosted on the server of the University of Alberta, Edmonton, Alberta, Canada;
[0934] TMHMM, hosted on the server of the Technical University of Denmark
[0935] PSORT (URL: psort.org)
[0936] PLOC (Park and Kanehisa, Bioinformatics, 19, 1656-1663, 2003).
[0937] PredictNLS, a Nuclear Localization Signal Prediction algorithm (Rostlab.org) predicted a nuclear localisation.

### Example 28

### Functional Assay for the HD8-Like Polypeptide

[0938] Di Cristina et al. (Plant J. 10, 393-402, 1996) provides a detailed characterization of GLABRA2, an Arabidopsis HD-ZIP protein of subfamily IV. The study includes a gel mobility shift assay.

### Example 29

### Cloning of the HD8-Like Encoding Nucleic Acid Sequence

[0939] The nucleic acid sequence was amplified by PCR using as template a custom-made Oryza sativa seedlings cDNA library. PCR was performed using a commercially available proofreading Taq DNA polymerase in standard conditions, using 200 ng of template in a 50 μl PCR mix. The primers used were prm15035 (SEQ ID NO: 567; sense, start codon in bold): 5′-ggggacaagtttgtacaaaaaagcaggcttaaacaatgaacggcgagcttaaact-3′ and prm15036 (SEQ ID NO: 568; reverse, complementary): 5′-ggggaccactttgtacaagaaagctgggtctttcg catgcaaatgctac-3′, which include the AttB sites for Gateway recombination. The amplified PCR fragment was purified also using standard methods. The first step of the Gateway procedure, the BP reaction, was then performed, during which the PCR fragment recombined in vivo with the pDONR201 plasmid to produce, according to the Gateway terminology, an “entry clone”, pHD8-like. Plasmid pDONR201 was purchased from Invitrogen, as part of the Gateway® technology.

[0940] The entry clone comprising SEQ ID NO: 385 was then used in an LR reaction with a destination vector used for Oryza sativa transformation. This vector contained as functional elements within the T-DNA borders: a plant selectable marker; a screenable marker expression cassette; and a Gateway cassette intended for LR in vivo recombination with the nucleic acid sequence of interest already cloned in the entry clone. A rice RCc3 promoter (SEQ ID NO: 565) for root specific expression was located upstream of this Gateway cassette.

[0941] After the LR recombination step, the resulting expression vector pRCc3::HD8-like (FIG. 24) was transformed into Agrobacterium strain LBA4044 according to methods well known in the art.

### Example 30

### Plant Transformation

[0942] Rice Transformation

[0943] The Agrobacterium containing the expression vector was used to transform Oryza sativa plants. Mature dry seeds of the rice japonica cultivar Nipponbare were dehusked. Sterilization was carried out by incubating for one minute in 70% ethanol, followed by 30 minutes in 0.2% HgCl₂, followed by a 6 times 15 minutes wash with sterile distilled water. The sterile seeds were then germinated on a medium containing 2,4-D (callus induction medium). After incubation in the dark for four weeks, embryogenic, scutellum-derived calli were excised and propagated on the same medium. After two weeks, the calli were multiplied or propagated by subculture on the same medium for another 2 weeks. Embryogenic callus pieces were sub-cultured on fresh medium 3 days before co-cultivation (to boost cell division activity).

[0944] Agrobacterium strain LBA4404 containing the expression vector was used for co-cultivation. Agrobacterium was inoculated on AB medium with the appropriate antibiotics and cultured for 3 days at 28° C. The bacteria were then collected and suspended in liquid co-cultivation medium to a density (OD₆₀₀) of about 1. The suspension was then transferred to a Petri dish and the calli immersed in the suspension for 15 minutes. The callus tissues were then blotted dry on a filter paper and transferred to solidified, co-cultivation medium and incubated for 3 days in the dark at 25° C. Co-cultivated calli were grown on 2,4-D-containing medium for 4 weeks in the dark at 28° C. in the presence of a selection agent. During this period, rapidly growing resistant callus islands developed. After transfer of this material to a regeneration medium and incubation in the light, the embryogenic potential was released and shoots developed in the next four to five weeks. Shoots were excised from the calli and incubated for 2 to 3 weeks on an auxin-containing medium from which they were transferred to soil. Hardened shoots were grown under high humidity and short days in a greenhouse.

[0945] 35 to 90 independent T0 rice transformants were generated for one construct. The primary transformants were transferred from a tissue culture chamber to a greenhouse. After a quantitative PCR analysis to verify copy number of the T-DNA insert, only single copy transgenic plants that exhibit tolerance to the selection agent were kept for harvest of T1 seed. Seeds were then harvested three to five months after transplanting. The method yielded single locus transformants at a rate of over 50% (Aldemita and Hodges1996, Chan et al. 1993, Hiei et al. 1994).

### Example 31

### Transformation of Other Crops

[0946] Corn Transformation

[0947] Transformation of maize (Zea mays) is performed with a modification of the method described by Ishida et al. (1996) Nature Biotech 14(6): 745-50. Transformation is genotype-dependent in corn and only specific genotypes are amenable to transformation and regeneration. The inbred line A188 (University of Minnesota) or hybrids with A188 as a parent are good sources of donor material for transformation, but other genotypes can be used successfully as well. Ears are harvested from corn plant approximately 11 days after pollination (DAP) when the length of the immature embryo is about 1 to 1.2 mm. Immature embryos are cocultivated with Agrobacterium tumefaciens containing the expression vector, and transgenic plants are recovered through organogenesis. Excised embryos are grown on callus induction medium, then maize regeneration medium, containing the selection agent (for example imidazolinone but various selection markers can be used). The Petri plates are incubated in the light at 25° C. for 2-3 weeks, or until shoots develop. The green shoots are transferred from each embryo to maize rooting medium and incubated at 25° C. for 2-3 weeks, until roots develop. The rooted shoots are transplanted to soil in the greenhouse. T1 seeds are produced from plants that exhibit tolerance to the selection agent and that contain a single copy of the T-DNA insert.

[0948] Wheat Transformation

[0949] Transformation of wheat is performed with the method described by Ishida et al. (1996) Nature Biotech 14(6): 745-50. The cultivar Bobwhite (available from CIMMYT, Mexico) is commonly used in transformation. Immature embryos are co-cultivated with Agrobacterium tumefaciens containing the expression vector, and transgenic plants are recovered through organogenesis. After incubation with Agrobacterium, the embryos are grown in vitro on callus induction medium, then regeneration medium, containing the selection agent (for example imidazolinone but various selection markers can be used). The Petri plates are incubated in the light at 25° C. for 2-3 weeks, or until shoots develop. The green shoots are transferred from each embryo to rooting medium and incubated at 25° C. for 2-3 weeks, until roots develop. The rooted shoots are transplanted to soil in the greenhouse. T1 seeds are produced from plants that exhibit tolerance to the selection agent and that contain a single copy of the T-DNA insert.

[0950] Soybean Transformation

[0951] Soybean is transformed according to a modification of the method described in the Texas A&M U.S. Pat. No. 5,164,310. Several commercial soybean varieties are amenable to transformation by this method. The cultivar Jack (available from the Illinois Seed foundation) is commonly used for transformation. Soybean seeds are sterilised for in vitro sowing. The hypocotyl, the radicle and one cotyledon are excised from seven-day old young seedlings. The epicotyl and the remaining cotyledon are further grown to develop axillary nodes. These axillary nodes are excised and incubated with Agrobacterium tumefaciens containing the expression vector. After the cocultivation treatment, the explants are washed and transferred to selection media. Regenerated shoots are excised and placed on a shoot elongation medium. Shoots no longer than 1 cm are placed on rooting medium until roots develop. The rooted shoots are transplanted to soil in the greenhouse. T1 seeds are produced from plants that exhibit tolerance to the selection agent and that contain a single copy of the T-DNA insert.

[0952] Rapeseed/Canola Transformation

[0953] Cotyledonary petioles and hypocotyls of 5-6 day old young seedling are used as explants for tissue culture and transformed according to Babic et al. (1998, Plant Cell Rep 17: 183-188). The commercial cultivar Westar (Agriculture Canada) is the standard variety used for transformation, but other varieties can also be used. Canola seeds are surface-sterilized for in vitro sowing. The cotyledon petiole explants with the cotyledon attached are excised from the in vitro seedlings, and inoculated with Agrobacterium (containing the expression vector) by dipping the cut end of the petiole explant into the bacterial suspension. The explants are then cultured for 2 days on MSBAP-3 medium containing 3 mg/l BAP, 3% sucrose, 0.7 Phytagar at 23° C., 16 hr light. After two days of co-cultivation with Agrobacterium, the petiole explants are transferred to MSBAP-3 medium containing 3 mg/l BAP, cefotaxime, carbenicillin, or timentin (300 mg/l) for 7 days, and then cultured on MSBAP-3 medium with cefotaxime, carbenicillin, or timentin and selection agent until shoot regeneration. When the shoots are 5-10 mm in length, they are cut and transferred to shoot elongation medium (MSBAP-0.5, containing 0.5 mg/l BAP). Shoots of about 2 cm in length are transferred to the rooting medium (MS0) for root induction. The rooted shoots are transplanted to soil in the greenhouse. T1 seeds are produced from plants that exhibit tolerance to the selection agent and that contain a single copy of the T-DNA insert.

[0954] Alfalfa Transformation

[0955] A regenerating clone of alfalfa (Medicago sativa) is transformed using the method of (McKersie et al., 1999 Plant Physiol 119: 839-847). Regeneration and transformation of alfalfa is genotype dependent and therefore a regenerating plant is required. Methods to obtain regenerating plants have been described. For example, these can be selected from the cultivar Rangelander (Agriculture Canada) or any other commercial alfalfa variety as described by Brown D C W and A Atanassov (1985. Plant Cell Tissue Organ Culture 4: 111-112). Alternatively, the RA3 variety (University of Wisconsin) has been selected for use in tissue culture (Walker et al., 1978 μm J Bot 65:654-659). Petiole explants are cocultivated with an overnight culture of Agrobacterium tumefaciens C58C1 pMP90 (McKersie et al., 1999 Plant Physiol 119: 839-847) or LBA4404 containing the expression vector. The explants are cocultivated for 3 d in the dark on SH induction medium containing 288 mg/L Pro, 53 mg/L thioproline, 4.35 g/L K2504, and 100 μm acetosyringinone. The explants are washed in half-strength Murashige-Skoog medium (Murashige and Skoog, 1962) and plated on the same SH induction medium without acetosyringinone but with a suitable selection agent and suitable antibiotic to inhibit Agrobacterium growth. After several weeks, somatic embryos are transferred to BOi2Y development medium containing no growth regulators, no antibiotics, and 50 g/L sucrose. Somatic embryos are subsequently germinated on half-strength Murashige-Skoog medium. Rooted seedlings were transplanted into pots and grown in a greenhouse. T1 seeds are produced from plants that exhibit tolerance to the selection agent and that contain a single copy of the T-DNA insert.

[0956] Cotton Transformation

[0957] Cotton is transformed using Agrobacterium tumefaciens according to the method described in U.S. Pat. No. 5,159,135. Cotton seeds are surface sterilised in 3% sodium hypochlorite solution during 20 minutes and washed in distilled water with 500 μg/ml cefotaxime. The seeds are then transferred to SH-medium with 50 μg/ml benomyl for germination. Hypocotyls of 4 to 6 days old seedlings are removed, cut into 0.5 cm pieces and are placed on 0.8% agar. An Agrobacterium suspension (approx. 108 cells per ml, diluted from an overnight culture transformed with the gene of interest and suitable selection markers) is used for inoculation of the hypocotyl explants. After 3 days at room temperature and lighting, the tissues are transferred to a solid medium (1.6 g/l Gelrite) with Murashige and Skoog salts with B5 vitamins (Gamborg et al., Exp. Cell Res. 50:151-158 (1968)), 0.1 mg/l 2,4-D, 0.1 mg/l 6-furfurylaminopurine and 750 μg/ml MgCL2, and with 50 to 100 μg/ml cefotaxime and 400-500 μg/ml carbenicillin to kill residual bacteria. Individual cell lines are isolated after two to three months (with subcultures every four to six weeks) and are further cultivated on selective medium for tissue amplification (30° C., 16 hr photoperiod). Transformed tissues are subsequently further cultivated on non-selective medium during 2 to 3 months to give rise to somatic embryos. Healthy looking embryos of at least 4 mm length are transferred to tubes with SH medium in fine vermiculite, supplemented with 0.1 mg/l indole acetic acid, 6 furfurylaminopurine and gibberellic acid. The embryos are cultivated at 30° C. with a photoperiod of 16 hrs, and plantlets at the 2 to 3 leaf stage are transferred to pots with vermiculite and nutrients. The plants are hardened and subsequently moved to the greenhouse for further cultivation.

### Example 32

### Phenotypic Evaluation Procedure

[0958] 32.1 Evaluation Setup

[0959] 35 to 90 independent T0 rice transformants were generated. The primary transformants were transferred from a tissue culture chamber to a greenhouse for growing and harvest of T1 seed. Six events, of which the T1 progeny segregated 3:1 for presence/absence of the transgene, were retained. For each of these events, approximately 10 T1 seedlings containing the transgene (hetero- and homo-zygotes) and approximately 10 T1 seedlings lacking the transgene (nullizygotes) were selected by monitoring visual marker expression. The transgenic plants and the corresponding nullizygotes were grown side-by-side at random positions. Greenhouse conditions were of shorts days (12 hours light), 28° C. in the light and 22° C. in the dark, and a relative humidity of 70%. Plants grown under non-stress conditions were watered at regular intervals to ensure that water and nutrients were not limiting and to satisfy plant needs to complete growth and development, unless they were used in a stress screen.

[0960] From the stage of sowing until the stage of maturity the plants were passed several times through a digital imaging cabinet. At each time point digital images (2048×1536 pixels, 16 million colours) were taken of each plant from at least 6 different angles.

[0961] T1 events can be further evaluated in the T2 generation following the same evaluation procedure as for the T1 generation, e.g. with less events and/or with more individuals per event.

[0962] Drought Screen

[0963] T1 or T2 plants are grown in potting soil under normal conditions until they approached the heading stage. They are then transferred to a “dry” section where irrigation is withheld. Soil moisture probes are inserted in randomly chosen pots to monitor the soil water content (SWC). When SWC goes below certain thresholds, the plants are automatically re-watered continuously until a normal level is reached again. The plants are then re-transferred again to normal conditions. The rest of the cultivation (plant maturation, seed harvest) is the same as for plants not grown under abiotic stress conditions. Growth and yield parameters are recorded as detailed for growth under normal conditions.

[0964] Nitrogen Use Efficiency Screen

[0965] T1 or T2 plants are grown in potting soil under normal conditions except for the nutrient solution. The pots are watered from transplantation to maturation with a specific nutrient solution containing reduced N nitrogen (N) content, usually between 7 to 8 times less. The rest of the cultivation (plant maturation, seed harvest) is the same as for plants not grown under abiotic stress. Growth and yield parameters are recorded as detailed for growth under normal conditions.

[0966] Salt Stress Screen

[0967] T1 or T2 plants are grown on a substrate made of coco fibers and particles of baked clay (Argex) (3 to 1 ratio). A normal nutrient solution is used during the first two weeks after transplanting the plantlets in the greenhouse. After the first two weeks, 25 mM of salt (NaCl) is added to the nutrient solution, until the plants are harvested. Growth and yield parameters are recorded as detailed for growth under normal conditions.

[0968] 32.2 Statistical Analysis: F Test

[0969] A two factor ANOVA (analysis of variants) was used as a statistical model for the overall evaluation of plant phenotypic characteristics. An F test was carried out on all the parameters measured of all the plants of all the events transformed with the gene of the present invention. The F test was carried out to check for an effect of the gene over all the transformation events and to verify for an overall effect of the gene, also known as a global gene effect. The threshold for significance for a true global gene effect was set at a 5% probability level for the F test. A significant F test value points to a gene effect, meaning that it is not only the mere presence or position of the gene that is causing the differences in phenotype.

[0970] 32.3 Parameters Measured

[0971] From the stage of sowing until the stage of maturity the plants were passed several times through a digital imaging cabinet. At each time point digital images (2048×1536 pixels, 16 million colours) were taken of each plant from at least 6 different angles as described in WO2010/031780. These measurements were used to determine different parameters.

[0972] Biomass-Related Parameter Measurement

[0973] The plant aboveground area (or leafy biomass) was determined by counting the total number of pixels on the digital images from aboveground plant parts discriminated from the background. This value was averaged for the pictures taken on the same time point from the different angles and was converted to a physical surface value expressed in square mm by calibration. Experiments show that the aboveground plant area measured this way correlates with the biomass of plant parts above ground. The above ground area is the area measured at the time point at which the plant had reached its maximal leafy biomass.

[0974] Increase in root biomass is expressed as an increase in total root biomass (measured as maximum biomass of roots observed during the lifespan of a plant); or as an increase in the root/shoot index, measured as the ratio between root mass and shoot mass in the period of active growth of root and shoot. In other words, the root/shoot index is defined as the ratio of the rapidity of root growth to the rapidity of shoot growth in the period of active growth of root and shoot. Root biomass can be determined using a method as described in WO 2006/029987.

[0975] Parameters Related to Development Time

[0976] The early vigour is the plant aboveground area three weeks post-germination. Early vigour was determined by counting the total number of pixels from aboveground plant parts discriminated from the background. This value was averaged for the pictures taken on the same time point from different angles and was converted to a physical surface value expressed in square mm by calibration.

[0977] AreaEmer is an indication of quick early development when this value is decreased compared to control plants. It is the ratio (expressed in %) between the time a plant needs to make 30% of the final biomass and the time needs to make 90% of its final biomass.

[0978] The “time to flower” or “flowering time” of the plant can be determined using the method as described in WO 2007/093444.

[0979] Seed-Related Parameter Measurements

[0980] The mature primary panicles were harvested, counted, bagged, barcode-labelled and then dried for three days in an oven at 37° C. The panicles were then threshed and all the seeds were collected and counted. The seeds are usually covered by a dry outer covering, the husk. The filled husks (herein also named filled florets) were separated from the empty ones using an air-blowing device. The empty husks were discarded and the remaining fraction was counted again. The filled husks were weighed on an analytical balance. The total number of seeds was determined by counting the number of filled husks that remained after the separation step. The total seed weight was measured by weighing all filled husks harvested from a plant.

[0981] The total number of seeds (or florets) per plant was determined by counting the number of husks (whether filled or not) harvested from a plant.

[0982] Thousand Kernel Weight (TKW) is extrapolated from the number of seeds counted and their total weight.

[0983] The Harvest Index (HI) in the present invention is defined as the ratio between the total seed weight and the above ground area (mm²), multiplied by a factor 10⁶.

[0984] The number of flowers per panicle as defined in the present invention is the ratio between the total number of seeds over the number of mature primary panicles.

[0985] The “seed fill rate” or “seed filling rate” as defined in the present invention is the proportion (expressed as a %) of the number of filled seeds (i.e. florets containing seeds) over the total number of seeds (i.e. total number of florets). In other words, the seed filling rate is the percentage of florets that are filled with seed.

### Example 33

### Results of the Phenotypic Evaluation of the Transgenic Plants

[0986] The results of the evaluation of transgenic rice plants expressing an HD8-like nucleic acid operably linked to the RCc3 promoter and grown under non-stress conditions are presented hereunder. An increase was observed for total seed weight, number of filled seeds, fill rate, and harvest index (Table M). In addition, two plant lines expressing the HD8-like nucleic acid were taller compared to control plants. The increase in height was for both lines more than 5% (p-value <0.1)

TABLE M
Data summary for transgenic rice plants; for each parameter, the overall
percent increase is shown, for each parameter the p-value is <0.05.

| Parameter | Overall |
|---|---|
| totalwgseeds | 15.4 |
| fillrate | 28.1 |
| harvestindex | 17.3 |
| nrfilledseed | 13.6 |

The application's sequence listing, which the Patent Office published only in electronic form, follows.

SEQUENCE LISTING (568 sequences)

SEQ ID NO: 1 - DNA, 717 bp, Arabidopsis thaliana
atgggttcaatctctttatccaattctatgcccataactcgacttccactacttacatcactctatcatcaaagcttccttccgatttcttcttcatctttctctcttcttcctctctctaatcgtcgtcgctcctccactttttcaccgtcaatcaccgtctctgccttcttcgctgctcctgccagcgttaataataataactctgttccggcaaaaaatggaggttacacagttggggatttcatgactccgagacagaatttgcacgttgttaagccctctacgtcggtcgatgatgcgttggaacttctggttgagaagaaagtcacgggattgcctgtaattgacgataattggacactggttggtgttgtttctgattacgatttgcttgcattggactccatctctggtcgcagtcaaaatgatacaaacttgttccctgatgtcgacagtacctggaaaacgtttaacgaactacagaaactgatcagtaagacatatggaaaagttgttggagacttgatgacaccgtctcctctcgttgtccgtgattctaccaatttagaagatgcagccaggttgcttctggaaacaaagttccgaagattacccgttgttgatgctgatggaaaactgattgggatccttacaaggggaaacgttgtaagggctgcgctgcagatcaaacgggaaaccgagaactctacatag

SEQ ID NO: 2 - protein, 238 aa, Arabidopsis thaliana
MGSISLSNSMPITRLPLLTSLYHQSFLPISSSSFSLLPLSNRRRSSTFSPSITVSAFFAAPASVNNNNSVPAKNGGYTVGDFMTPRQNLHVVKPSTSVDDALELLVEKKVTGLPVIDDNWTLVGVVSDYDLLALDSISGRSQNDTNLFPDVDSTWKTFNELQKLISKTYGKVVGDLMTPSPLVVRDSTNLEDAARLLLETKFRRLPVVDADGKLIGILTRGNVVRAALQIKRETENST

SEQ ID NO: 3 - DNA, 714 bp, Arabidopsis lyrata
atgggttccatctctttatcctattctctgcccataacgcgacttccactacttacatcactcaatcatcaatgcttccttccgatttcttcttcatctttccctcttcttcctctctctaatcgtcgtcgctcctccactttttcaccgtcaatcgccgtctctgccttcttcgcagctcctgccagcgttaataataactctgttccggcaaaaaatggaggttacactgttggggatttcatgacaccgagacagaatttgcacgttgttaagccctcaacctcggtcgatgatgcattggaacttctggttgagaagaaagtcacgggattgcctgtaattgatgataattggacactggttggtgttgtttctgattacgatttgcttgcactggactccatctctggccgcagtcaaaatgatacaaacttgttccctgatgttgacagtacctggaaaacgtttaatgaactccagaaactgatcagtaagacatatggaaaagttgttggagacttgatgacaccatctcctctcgttgtccgtgattctaccaatttagaagatgcagccaggttgcttctggaaacaaaattccgaagattaccagtcgtggatgctgatggaaaactgattgggatccttacaaggggaaacgttgtaagggctgcgctgcagatcaaacgggaaaccgagaactctacatag

SEQ ID NO: 4 - protein, 237 aa, Arabidopsis lyrata
MGSISLSYSLPITRLPLLTSLNHQCFLPISSSSFPLLPLSNRRRSSTFSPSIAVSAFFAAPASVNNNSVPAKNGGYTVGDFMTPRQNLHVVKPSTSVDDALELLVEKKVTGLPVIDDNWTLVGVVSDYDLLALDSISGRSQNDTNLFPDVDSTWKTFNELQKLISKTYGKVVGDLMTPSPLVVRDSTNLEDAARLLLETKFRRLPVVDADGKLIGILTRGNVVRAALQIKRETENST

SEQ ID NO: 5 - DNA, 702 bp, Brassica napus
atgggttcggtctctttctccagttctatgcccataacgcgacttccactacttacatcactcagtcaatgccttcttcccacttcttcatccttctcacttcctcctctctccagccgtcgtcgctccaatgtttcacagacaatcaccgcctctgccgtcttctcagctcctgccggcgttaatgactctcttccggcaagaaacgagggttacacagttggggatttcatgacagggagacagcatctgcatgttgttaagccctcaacatcggtcgatgatgcattggaacttctggttgagaagaaagtcactggattgcctgtaattgatgatgattggaaactggttggtgttgtttctgattacgacttgcttgcactggattccatttctggccgctcccaaaatgaaacaaacttgttccctaacgtcgacagcacctggaaaacgtttaatgaactccagaaactgataagtaagacacatggacaagttgttggagacttgatgaccccttctcctctggttgtccgtggttctaccaatttagaagatgcagccaggttgcttctggaaactaagttccgaagattacccgttgtggattcagatggaaaactgattgggattcttacaagggggaacgttgtaagggctgcactgcagatcaagcgcgaaaccgaaaaatcagcatag

SEQ ID NO: 6 - protein, 233 aa, Brassica napus
MGSVSFSSSMPITRLPLLTSLSQCLLPTSSSFSLPPLSSRRRSNVSQTITASAVFSAPAGVNDSLPARNEGYTVGDFMTGRQHLHVVKPSTSVDDALELLVEKKVTGLPVIDDDWKLVGVVSDYDLLALDSISGRSQNETNLFPNVDSTWKTFNELQKLISKTHGQVVGDLMTPSPLVVRGSTNLEDAARLLLETKFRRLPVVDSDGKLIGILTRGNVVRAALQIKRETEKSA

SEQ ID NO: 7 - DNA, 735 bp, Brassica oleracea
atgggttcggtctctttctccaattctatgcccataacgcgacttccactacttacatcactcaatcaatcccttcttcccacttcttcatcacttcctcctctctccaaccgtcgtcgctccaatgtttcacagacaatcaccgcctctgccgtcttctcagctcctgccggcgttaatgactctcttccggcaagaaacgagggttacacagttggggatttcatgacagggagacagcatctgcatgttgttaagccctcaacatcggtcgatgatgcattggaacttctggttgagaagaaagtcactggattgcctgtaattgatgatgattggaaactggttggtgttgtttctgattacgacttgcttgcactggattccatttctggccgctcccaaaatgaaacaaacttgttccctaacgtcgacagcacctggaaaacgtttaatgaactccagaaactgataagtaagacacatggacaagttgttggagacttgatgaccccttctcctctggttgtccgtggttctaccaatttagaagatgcagccaggttgcttctggaaactaagttccgaagattacccgttgtgggttcagatggaaaactgattgggattcttacaagggggaacgttgtaagggctgcactgcagatcaagcgcgaaaccgaaaaatcagcacagattgagaaagcagcagttatagagcagatattcctgtaa

SEQ ID NO: 8 - protein, 244 aa, Brassica oleracea
MGSVSFSNSMPITRLPLLTSLNQSLLPTSSSLPPLSNRRRSNVSQTITASAVFSAPAGVNDSLPARNEGYTVGDFMTGRQHLHVVKPSTSVDDALELLVEKKVTGLPVIDDDWKLVGVVSDYDLLALDSISGRSQNETNLFPNVDSTWKTFNELQKLISKTHGQVVGDLMTPSPLVVRGSTNLEDAARLLLETKFRRLPVVGSDGKLIGILTRGNVVRAALQIKRETEKSAQIEKAAVIEQIFL

SEQ ID NO: 9 - DNA, 687 bp, Brassica oleracea
atgggttcgatctctctgtcaaattctctgcccataccgcgacttccactacatacatcatcactcaatccatgccttccttcctccttctctcttcctcctcgtcgctccactttttcaccgcgaatctccgcctctgctgtcttcgcagctccttccggcgttaataactctgtcccgggtaaaaacgggggttacacagttggtgatttcatgacagggaaacagcatcttcatgttgttaagccctctacgtcggttgatgatgcattggaacttctggttgagaagaaggtcacgggcttgcctgtaattgatgatgattggagtctggttggcgttgtttctgattacgacttacttgcactcgactctatttctggccggagcagccaaaatgatacaaacatgttccctaacgtggacagttcatggaaaacatttaacgaacttcagaagctgataagcaagacacatgggaaagtggttggagatttgatgacgccttctcctctggttgtccgtggctctaccaatttagaagatgctgccaggttgctactggaaacaaagttcagaagattaccagtcgtggattcagatggaaaactgattgggatcctaacaagggggaacgttgtaagggctgcactgcagatcaagcgggaaaccgagaactcaacctag

SEQ ID NO: 10 - protein, 228 aa, Brassica oleracea
MGSISLSNSLPIPRLPLHTSSLNPCLPSSFSLPPRRSTFSPRISASAVFAAPSGVNNSVPGKNGGYTVGDFMTGKQHLHVVKPSTSVDDALELLVEKKVTGLPVIDDDWSLVGVVSDYDLLALDSISGRSSQNDTNMFPNVDSSWKTFNELQKLISKTHGKVVGDLMTPSPLVVRGSTNLEDAARLLLETKFRRLPVVDSDGKLIGILTRGNVVRAALQIKRETENST

SEQ ID NO: 11 - DNA, 540 bp, Brassica rapa
atgggttcgatctctctgtcaaattctctgcccataccgcgacttccactacatacatcatcactcaatccatcatgccttccttcatccttctctcttcctcctcgtcgctccactttttcaccgctagtctcggcctcggcagtcttcgcagctccttccggcgttaataactctgttcccggtaaaaacgggggttacacagttggtgatttcatgacagggaaacagcatcttcatgttgttaagcccacaacatctgtcgatgatgcattggaacttctggttgagaagaaagtcacgggcttgcctgtaattgatgatgattggaatctggttggcgttgtttctgattacgacttgcttgcactcgactccatttctggccggagcagccaaaatgatacaaacatgttccctaacgtggacagttcatggaaaacatttaacgaactccagaagctgataagcaagacacatgggaaagtagttggagatttgatgacgccttctcctccttgttgtccgtggctctactaa

SEQ ID NO: 12 - protein, 179 aa, Brassica rapa
MGSISLSNSLPIPRLPLHTSSLNPSCLPSSFSLPPRRSTFSPLVSASAVFAAPSGVNNSVPGKNGGYTVGDFMTGKQHLHVVKPTTSVDDALELLVEKKVTGLPVIDDDWNLVGVVSDYDLLALDSISGRSSQNDTNMFPNVDSSWKTFNELQKLISKTHGKVVGDLMTPSPPCCPWLY

SEQ ID NO: 13 - DNA, 612 bp, Brassica rapa
tttcccgcttgatctgcagtgcagcccttacaacgttcccccttgttagaatcccagccagttttccatctgaattcacgactggtaaccttctgaactttgtttccagtagcaacctggcagcatcttctaaattagtagagccacggacaacaagaggagaaggcgtcatcaaatctccaactactttcccatgtgtcttgcttatcagcttctggagttcgttaaatgttttccatgaactgtccacgttagggaacatgtttgtatcattttggctgctccggccagaaatggagtcgagtgcaagcaagtcgtaatcagaaacaacgccaaccagattccaatcatcatcaattacaggcaagcccgtgactttcttctcaaccagaagttccaatgcatcatcgacagatgttatgggcttaacaacatgaagatgctgtttccctgtcatgaaatcaccaactgtgtaacccccgtttttaccaggaacagagttattaacgccggaaggagctgcgaagactgccgaggccgagactagcggtgaaaaagtggagcgacgaggaggagagagaagatgacgacgcatgatggattgagtgatga

SEQ ID NO: 14 - protein, 203 aa, Brassica rapa
MRRHLLSPPRRSTFSPLVSASAVFAAPSGVNNSVPGKNGGYTVGDFMTGKQHLHVVKPITSVDDALELLVEKKVTGLPVIDDDWNLVGVVSDYDLLALDSISGRSSQNDTNMFPNVDSSWKTFNELQKLISKTHGKVVGDLMTPSPLVVRGSTNLEDAARLLLETKFRRLPVVNSDGKLAGILTRGNVVRAALQIKRETENST

SEQ ID NO: 15 - DNA, 711 bp, Arabidopsis lyrata
atggacgccttcctatactctgttccactctccttcacacgcctacgcgcatcatcctctccttcctcgccgtatcttcttccgccgaggtttctctcggttcagccatgtcacaaattcaatttctctcgaagcttcccttccaaatccaggattccttcagcttcttccgccgccggttccactttgatgaagaattcctcttctccaagaagtggagtgtacactgttggtgagttcatgacaaagaaggatgacttgcacgtggtgaaacctacgactactgtggatgaagctctggaactacttgtggagaatagaattacaggatttcctgtgatagacgaagactggaaattggttgggcttgtttcagattatgacttgttggctttggactccatatctggtagtggaagaacagaaaattccatgttccctgaggttgacagcacctggaaaactttcaatgcagtgcaaaagctactcagcaaaaccaatgggaagcttgttggagatttaatgacaccagctccactagttgttgaggaaaaaaccaacctcgaagatgctgctaaaattttgcttgagacaaaatatcgccggctccctgtggtagattctgatggcaaattggtcggtatcatcacaagaggaaacgtggttagagccgcgcttcaaataaagcgctccggtgataggaatgcttga

SEQ ID NO: 16 - protein, 236 aa, Arabidopsis lyrata
MDAFLYSVPLSFTRLRASSSPSSPYLLPPRFLSVQPCHKFNFSRSFPSKSRIPSASSAAGSTLMKNSSSPRSGVYTVGEFMTKKDDLHVVKPTTTVDEALELLVENRITGFPVIDEDWKLVGLVSDYDLLALDSISGSGRTENSMFPEVDSTWKTFNAVQKLLSKTNGKLVGDLMTPAPLVVEEKTNLEDAAKILLETKYRRLPVVDSDGKLVGIITRGNVVRAALQIKRSGDRNA

SEQ ID NO: 17 - DNA, 711 bp, Arabidopsis thaliana
atggacgccgtcctttactctgttccactctccttcactcccctacgcgcatcatcctctccttcctcgccgtatcttcttctgccgaggtttctctccgttcagccatgtcacaaattcaccttctctcgaagcttcccttccaaatcccggattccctcagcttcttccgccgccggttccacgttgatgacgaattcctcttcgccaagaagtggagtgtacactgttggtgagttcatgacaaagaaagaggacttgcacgtggtgaaacctacgactactgtggatgaagctctggaactccttgtggagaatagaatcactggatttcctgtaattgacgaagactggaaattggttgggcttgtttcagattatgacttgttggctttggactccatatctggtagtggaagaacagaaaattccatgttccctgaggttgacagcacctggaaaactttcaatgctgtgcaaaagctactcagcaaaaccaatgggaagcttgttggagatttaatgacaccagctccactagttgttgaggaaaaaaccaacctggaagatgctgctaaaatattgcttgagacaaaatatcgccggctccctgtggtagattctgatggcaaattggttggtatcatcacaagaggaaacgtggttagagccgcgcttcaaataaagcgctctggtgataggaatgcttga

SEQ ID NO: 18 - protein, 236 aa, Arabidopsis thaliana
MDAVLYSVPLSFTPLRASSSPSSPYLLLPRFLSVQPCHKFTFSRSFPSKSRIPSASSAAGSTLMTNSSSPRSGVYTVGEFMTKKEDLHVVKPTTTVDEALELLVENRITGFPVIDEDWKLVGLVSDYDLLALDSISGSGRTENSMFPEVDSTWKTFNAVQKLLSKTNGKLVGDLMTPAPLVVEEKTNLEDAAKILLETKYRRLPVVDSDGKLVGIITRGNVVRAALQIKRSGDRNA

SEQ ID NO: 19 - DNA, 744 bp, Aquilegia sp.
atgagttcacttattcatccaatccacacgcagtttcactttgcttccatatccaccacttcatcttcttcaacaaatcttcttgttcttcttccttctcatcccactttctttgtatcttcttcaattaaaagttctattatcaaactcaaccattctttatcacaacgttttgatcgatgtcgcagtgtttccgcagttgctgctaatggtggtactttgatgtctgattcttcaccgtcgaaaaatggggtgttcacggttggtgattttatgaccaaaaaggagttattacacgttgtaaagcctacaaccaccattgatgaagcgttggagattcttgtagaaaacagaattactggttttcctgtgattgacgatgattggaaactggttggtcttgtttcggattacgatctcttagctcttgactctgtgtcaggtgccggagttgctgacacaagtatgtttcctgaagcagacagctcatggaaaacattcaatgagatacaaaagttacttagtaagacaaatggtaaagtaattgctgatgtaatgacgcctgcaccccttgttgttcgcgaaactacaaaccttgaagatgctgcaagattattgcttgaaacaaaataccgccgacttcccgttgtggacagtgttgggaagctggttggaatcataacaaggggaaatgttgttagagctgcccttcatatcaaacgcgaaattgagaagagtgcataa

SEQ ID NO: 20 - protein, 247 aa, Aquilegia sp.
MSSLIHPIHTQFHFASISTTSSSSTNLLVLLPSHPTFFVSSSIKSSIIKLNHSLSQRFDRCRSVSAVAANGGTLMSDSSPSKNGVFTVGDFMTKKELLHVVKPTTTIDEALEILVENRITGFPVIDDDWKLVGLVSDYDLLALDSVSGAGVADTSMFPEADSSWKTFNEIQKLLSKTNGKVIADVMTPAPLVVRETTNLEDAARLLLETKYRRLPVVDSVGKLVGIITRGNVVRAALHIKREIEKSA

SEQ ID NO: 21 - DNA, 744 bp, Aquilegia sp.
atgagttcacttattcatccaatccacacgcagtttcactttgcttccatatccaccacttcatcttcttcaacaaatcttcttgttcttcttccttctcatcccactttctttgtatcttcttcaattaaaagttctattatcaaactcaaccattctttatcacaacgttttgatcgaggtcgcagtgtttccgcagttgctgctaacggtggtactttgatgtctgattcttcaccgtcgaaaaatggggtgttcacggttggtgattttatgaccaaaaaggagttattacacgttgtaaagcctacaaccaccattgatgaagcgttggagattcttgtagaaaacagaattactggttttcctgtgattgacgatgattggaaactggttggtcttgtttcggattacgatctcttagctcttgactctgtgtcaggtgccggagttgctgacacaagtatgtttcctgaagcagacagctcatggaaaacattcaatgagatacaaaagttacttagtaagacaaatggtaaagtaattgctgatgtaatgacgcctgcaccccttgttgttcgcgaaactacaaaccttgaagatgctgcaagattattgcttgaaacaaaataccgccgacttcccgttgtggacagtgttgggaagctggttggaatcataacaaggggaaatgttgttagagctgcccttcatatcaaacgcgaaattgagaagagtgcataa

SEQ ID NO: 22 - protein, 247 aa, Aquilegia sp.
MSSLIHPIHTQFHFASISTTSSSSTNLLVLLPSHPTFFVSSSIKSSIIKLNHSLSQRFDRGRSVSAVAANGGTLMSDSSPSKNGVFTVGDFMTKKELLHVVKPTTTIDEALEILVENRITGFPVIDDDWKLVGLVSDYDLLALDSVSGAGVADTSMFPEADSSWKTFNEIQKLLSKTNGKVIADVMTPAPLVVRETTNLEDAARLLLETKYRRLPVVDSVGKLVGIITRGNVVRAALHIKREIEKSA

SEQ ID NO: 23 - DNA, 702 bp, Brachypodium distachyon
atggacgccaggctgctgcacctgtccttcgactgcccggccgtcgccggcggccggccgtcccgtctacctgcggggccacggatggctcccgctgcaccccgcgcgcttccccggacctcatccgtccgcgcgtccgccggggccgcagccaccgccgctcgaggccatctgccgcaccacggctccgtggctggggaaaccagtcgaacttacactgttggtgattttatgactaaacgggaagaacttcacgttgtgaaaccaaccacttcagttgatgaagcccttgagaggctggtggagcataggataactggttttcctgttatcgacgatgactggaatttggttggtgttgtctcagattatgatctgttagcactggactcaatatcaggaaatggaatggctgaaggagacatatttcctgaggtggacagcacttggaagacatttcgtgagatacagaagctcctgagcaaaaccaatgggcaagtaattagtgatgttatgacttcttcacctctcgtggtgcgtgaaactactaaccttgaagatgctgcaaggttactccttgtaactaaataccgcaggctgcctgtagtcgacagctcaggcaaactggttgggatcattacaagagggaacgtcgtcagagctgcccttgaatttaagaaaaaggttgaagggagcctttga

SEQ ID NO: 24 - protein, 233 aa, Brachypodium distachyon
MDARLLHLSFDCPAVAGGRPSRLPAGPRMAPAAPRALPRTSSVRASAGAAATAARGHLPHHGSVAGETSRTYTVGDFMTKREELHVVKPTTSVDEALERLVEHRITGFPVIDDDWNLVGVVSDYDLLALDSISGNGMAEGDIFPEVDSTWKTFREIQKLLSKTNGQVISDVMTSSPLVVRETTNLEDAARLLLVTKYRRLPVVDSSGKLVGIITRGNVVRAALEFKKKVEGSL

SEQ ID NO: 25 - DNA, 702 bp, Brassica napus
atggacgccgtcgtccacgcttgtccactctccatcacgcgcctacgcgcaccgccctccgcttcttctccaactcttatcccgccgagattcctctccatccactccaccttctctcccactctcagctccctctccaaatcccgaggtccttcagcctcctccgccggcgccacgttgatggcgaagtcctcttcgccaagaagtggagtgtacactgttggtgagttcatgaccaagaaggatgacttgcatgtggtcaaacctaccaccactgttgatgaagctctagaaatccttgtggagaataggattacaggatttcctgtgatagaccaagactggaagctggttgggcttgtttcagattatgatttgttggctttggactccatctctggtagtggaagtacagaaaatgccatgttccctgaggttgacagcacctggaaaactttcaacgcagtgcaaaagctactaagcaaaaccaatgggaagcttgttggagatttaatgacaccagctccagttgttgttgaggaaaataccaatcttgaagatgctgctaaaatcttgctcgagaccaaatatcgccggctccctgtggtagattctgatggcaaattggttggaattatcactagaggaaacgtggttagagccgcacttcaaataaagcgcactggtgataggaacgcttga

SEQ ID NO: 26 - protein, 233 aa, Brassica napus
MDAVVHACPLSITRLRAPPSASSPTLIPPRFLSIHSTFSPTLSSLSKSRGPSASSAGATLMAKSSSPRSGVYTVGEFMTKKDDLHVVKPTTTVDEALEILVENRITGFPVIDQDWKLVGLVSDYDLLALDSISGSGSTENAMFPEVDSTWKTFNAVQKLLSKTNGKLVGDLMTPAPVVVEENTNLEDAAKILLETKYRRLPVVDSDGKLVGIITRGNVVRAALQIKRTGDRNA

SEQ ID NO: 27 - DNA, 714 bp, Bruguiera gymnorrhiza
atggcgtctccttgtttaactacctcagcaaccaattgttataatcctccaatggctctgcctcggcagaagcactcgctcttttgtcatcaccaccctcttgtctctgcgagacccacatcgaaatgtcgtcgtttgcgcttctcccattgttttcctccgcctcgctcgagcttttctcccgcgttttccaccaaccccgtcccggctccccgagaacagacctacaaggttggtaatttcatgatcaaaaaggaggatttacttgttctcaaaaccaccacaaccgttgacgaagcattggtggctttagtggaggacagtgtaaccggttttcccgttattgatgatgactggaaattggttggtgttgtttctgattatgacatactggcaatcgactccatatcaggttgcagtcaaattgatagaaacgtgtttcctgatgttgatctttcttggaaaaccttcaatgagctacggaaaattctgatgaaaactcatggcaaagttgttggtgatttgatgacacccaatccccttgttgttcatgaaaccactgatatagaaactgttgccaggttgcttcttgatacaaaatatcatcggctgccagtggtagacagtgatgacaagctggttggagtcattgcacgggaagatgttgttaaagctgctctgttgataaaacgtgccagtgaaaggtcaatatga

SEQ ID NO: 28 - protein, 237 aa, Bruguiera gymnorrhiza
MASPCLTTSATNCYNPPMALPRQKHSLFCHHHPLVSARPTSKCRRLRFSHCFPPPRSSFSPAFSTNPVPAPREQTYKVGNFMIKKEDLLVLKTTTTVDEALVALVEDSVTGFPVIDDDWKLVGVVSDYDILAIDSISGCSQIDRNVFPDVDLSWKTFNELRKILMKTHGKVVGDLMTPNPLVVHETTDIETVARLLLDTKYHRLPVVDSDDKLVGVIAREDVVKAALLIKRASERSI

SEQ ID NO: 29 - DNA, 711 bp, Capsicum annuum
atgtcatctatctcgctgtcgggaatctccctccgccgctcctccgctgctttccaccaccagctcccttgccttcttttatctcatccatcccaaaatgttgctactttcactaaatgtttcctctccctccgcctttggaattcgcgcaaccatttctccgttaccgccaccaacactttgaccgccaattctgcagagccaagaaatggtatatatacagtaggtgatttcatgacaagaaaagaggatctacatgtggtaaaaccatcaacatctgtagatgaagcgttggaaattttggtagaacgccggatcactggtttccctgtggttgatgatgactggaaattggttggtcttgtttctgattatgatctattggctctggattctgtatcaggtacaggaggagctgatgcaaacatgttcccagaagtgggcagcaactggaaaacattcaatgaggttcaaaagttgattagtaagaccaaggggaaagtggttggtgatttgatgacacatgctccattagtagttcgggagtctaccaatcttgaggatgcagcaagacttctgctgaaaacaaagtaccgccggcttcctgttgtagatagtgatgcaaagctggtgggaataataaccaggggaaatgtcgtgagagctgcccttcatataaaacgggtcatggaaatggaaggccaacagtga

SEQ ID NO: 30 - protein, 236 aa, Capsicum annuum
MSSISLSGISLRRSSAAFHHQLPCLLLSHPSQNVATFTKCFLSLRLWNSRNHFSVTATNTLTANSAEPRNGIYTVGDFMTRKEDLHVVKPSTSVDEALEILVERRITGFPVVDDDWKLVGLVSDYDLLALDSVSGTGGADANMFPEVGSNWKTFNEVQKLISKTKGKVVGDLMTHAPLVVRESTNLEDAARLLLKTKYRRLPVVDSDAKLVGIITRGNVVRAALHIKRVMEMEGQQ

SEQ ID NO: 31 - DNA, 720 bp, Capsicum annuum
atggattccgttctcaatttcagttcattttctccgatttgcgttcttaattatcgcctttctccggccacgttctcttgcccagctcgtccttgtaccggagatcccgccgttgctaaatctcgacggcggcaactttctcgatctctacgggcggcgtcttttccttcaaactctgctaacggtgctgctgctgatactgcaaattctcagactccaagagatggaaattactcagttggtgactttatgactaggaaagaagatttacatgtagtaaaaactacaactaaagttggcgaagcccttgagatgcttgtggaaaaaagagttactgggcttccggtagttgatgatgactggaatttggttggcgttgtttctgattatgacctactggcactcgactctatatcaggagctggccaagctgacacaaatctgtttcctgatgttgacagtacttggaagacattcaatgaggttcaaaagctactgagcaaaactaatggaaaagttgttggtgatgtcatgacaccaactccattgtccatccgcgaagacaccaaccttgaagatgctgcgaggttgttgctccaaacgaagtatcgtcgactgcctgttgtagatggtgatggcaaactggttgggattatcacaaggggcaatgttgtcagagccgctctgcaaataaaacgcactattgagaatatccaatga

SEQ ID NO: 32 - protein, 239 aa, Capsicum annuum
MDSVLNFSSFSPICVLNYRLSPATFSCPARPCTGDPAVAKSRRRQLSRSLRAASFPSNSANGAAADTANSQTPRDGNYSVGDFMTRKEDLHVVKTTTKVGEALEMLVEKRVTGLPVVDDDWNLVGVVSDYDLLALDSISGAGQADTNLFPDVDSTWKTFNEVQKLLSKTNGKVVGDVMTPTPLSIREDTNLEDAARLLLQTKYRRLPVVDGDGKLVGIITRGNVVRAALQIKRTIENIQ

SEQ ID NO: 33 - DNA, 738 bp, Citrus clementina
atggactcgattgtactcccacactcaatctccgtcgcgcgcctacgcgccccccctgccggtcgtaccagtggtcgtacttcattcgctctccagctgccatgcctacttctctctcgtcccggttgtagagtgttctcagtgttggcgacctcatccgatcgcgtctcggcgcttcgcaggtcgtcggttgttttcgccagtggtaccttgacggccaactccgctgcgccgagcagtggagtttatacggttggtgatttcatgacaacaaaagaggagttgcatgtggtaaaacctacaacgactgtagatgaagctctggaaattcttgtagagaagagaattactggttttcctgtgattgatgatgactggaaattggttggtcttgtatccgattatgacttgttagcattggactctatatcaggcagcggacgagctgataacagcatgtttcccgaagttgacagcacttggaaaacattcaacgaggtgcagaagttgcttagtaaaaccaatgggaagatggtgggtgacttaatgacgccggccccagttgtagttcgggaaacgactaatcttgaggatgctgctagattgttacttgagacaaaataccgcagacttccagtcgtggatgctgatggtaagctggttggaattatcacaagaggaaatgtagtaagggcggctcttcaaataaaacatgcgactgaaatgggagcacaatag

SEQ ID NO: 34 - protein, 245 aa, Citrus clementina
MDSIVLPHSISVARLRAPPAGRTSGRTSFALQLPCLLLSRPGCRVFSVLATSSDRVSALRRSSVVFASGTLTANSAAPSSGVYTVGDFMTTKEELHVVKPTTTVDEALEILVEKRITGFPVIDDDWKLVGLVSDYDLLALDSISGSGRADNSMFPEVDSTWKTFNEVQKLLSKTNGKMVGDLMTPAPVVVRETTNLEDAARLLLETKYRRLPVVDADGKLVGIITRGNVVRAALQIKHATEMGAQ

SEQ ID NO: 35 - DNA, 705 bp, Citrus clementina
atgagctcgatttcgattcccagttgtctcgcactcgcgcgactcaacgccaacggcgttattaactccgttcctcaccttcagttaccgatcacggtggccactccttcgcatctctccaaacgactacgttttttcactgtctctcgcgaggtgaaggcttttgctcacaacggcatcgggatcaccaactccgttcctccgagaaatggaacgtacacagttggtgacttcatgacgaagaaagaggatctacacgctgtaaagactactacaacggtcgatgaagctttagaacgtcttgtggagaagagaattaccggttttcctgtgattgatgacgactggaagctggttggtgttgtttcagattatgacttgctagcacttgattccatttcaggtggcaatcaaaatgacacaagcttgtttcctaatgtcaatagcagttggaaaacattcaatgagttacagagacttcttagtaagactaatggaaaagttgttggtgacttgatgacgcctgctccgctcgttgttcatgaaaacaccaacttagaagatgctgctaggttgttgcttgaaacaaaataccgtagactgccggtagtagatggtgatggcaagctggttggactcatcacaagaggaaatgtggttagagctgccctcaggataaaacgggatggggaaagatcgacataa

SEQ ID NO: 36 - protein, 234 aa, Citrus clementina
MSSISIPSCLALARLNANGVINSVPHLQLPITVATPSHLSKRLRFFTVSREVKAFAHNGIGITNSVPPRNGTYTVGDFMTKKEDLHAVKTTTTVDEALERLVEKRITGFPVIDDDWKLVGVVSDYDLLALDSISGGNQNDTSLFPNVNSSWKTFNELQRLLSKTNGKVVGDLMTPAPLVVHENTNLEDAARLLLETKYRRLPVVDGDGKLVGLITRGNVVRAALRIKRDGERST

SEQ ID NO: 37 - DNA, 702 bp, Cichorium endivia
atggcttcaattcctctactcgatcccctaccatcttctctactccgtgctaccaccgcctccgttcccaccgccttctttcaccatcagatgccttgtctaatctcatctcctacggtgctcgcctttaggctttcttcttcttgccgcttttccgattcccgcagatcaacgctcacagtcgctgcagctgtgccgcaaaaaagtggagaattaattgtgggtgattttatgaccaagaaagaggagttacatgtggtaaaccccacaaccactgtagatgaagcattaaaagctcttgtagagaacagaataaccggctttcctgtaatcgatgatgactggaaattggttggggttgtatcagattatgacttgttagcactggattctatatcagaaacaggacgcgctgacactgacatgttccccgaggtcgatagcacttggaaaacattcaatgaggtacaaaagctactcagtaaaaccgacgggaaattagttggtgatttgatgacatcagcaccgttagtagttcgtgaagccaccaatctcgaggatgccgcaagattgttgcttgaaaccaaatatcgacgattgccggttgtagatggtgaagggaagttggtggggattattactagaggaaacgtggtaagagcggctctgaaaataaaaaaagaaaacgaaatgaaagcgtga

SEQ ID NO: 38 - protein, 233 aa, Cichorium endivia
MASIPLLDPLPSSLLRATTASVPTAFFHHQMPCLISSPTVLAFRLSSSCRFSDSRRSTLTVAAAVPQKSGELIVGDFMTKKEELHVVNPTTTVDEALKALVENRITGFPVIDDDWKLVGVVSDYDLLALDSISETGRADTDMFPEVDSTWKTFNEVQKLLSKTDGKLVGDLMTSAPLVVREATNLEDAARLLLETKYRRLPVVDGEGKLVGIITRGNVVRAALKIKKENEMKA

SEQ ID NO: 39 - DNA, 705 bp, Cichorium intybus
atggcttcaattcctctacttctcgatcctctaccatcttctctactccgtgctaccaccgcctccattcccatcgccttctttcaccatcagatgccttgtttaatctcatctccgtcagtgctcgcctttaggctttcttcttcttgccgcttttccgattcccgcagatcaacgctcacagtcgctgcagctgtgccgcaaaaaagtggagaattaattgtgggtgattttatgaccaagaaagaggagttacatgtggtaaagcccacaaccactgtagatgaagcattgaaagctcttgtagagaacagaataaccggctttcctgtaatcgatgatgactggaaattggttggggttgtatcagattatgacttgttagcactggattctatatcaggcacaggacgcgctgacactgacatgttccccgaggtcgatagcacttggaaaacattcaatgaggtacaaaggctactcagtaaaaccgacgggaaattagttggtgatttgatgacatcagcaccgttagtagttcgtgaaaccaccaatctcgaagatgccgcaagattgttgcttgaaactaaatatcgacgattgccggtcgtagatggtgaagggaagttggtggggattattactagaggaaacgtggtaagagcggctctgaaaataaaaaaagaaaacgaaatgaaagcgtga

SEQ ID NO: 40 - protein, 234 aa, Cichorium intybus
MASIPLLLDPLPSSLLRATTASIPIAFFHHQMPCLISSPSVLAFRLSSSCRFSDSRRSTLTVAAAVPQKSGELIVGDFMTKKEELHVVKPTTTVDEALKALVENRITGFPVIDDDWKLVGVVSDYDLLALDSISGTGRADTDMFPEVDSTWKTFNEVQRLLSKTDGKLVGDLMTSAPLVVRETTNLEDAARLLLETKYRRLPVVDGEGKLVGIITRGNVVRAALKIKKENEMKA

SEQ ID NO: 41 - DNA, 720 bp, Cichorium intybus
atggactcgatcatcttaccggcggggtctatttccggtgttgtttcagccgcacagtatcgtcgaataccgtatacatcctcacagactagcgctttttgccagcggcaatttctctctactcgttcgtcaccacggaactccgatcgcgatcatagccgttttgcagctattcattccgtcgctgctgatacgactaactcctcgccgacaagagatggaacatacacagttgctgattttatgacaagaaaagcaaacttacttgtggtagaaacaacaactacagttgataaagcattagagattcttgtggagaaaagaatcacaggctttccagtggttgatgctgattggaatctggttggtgtcgtttcagattatgacttgttagctcttgattcaatatcaggtggtaatcacagtgagacaagtttgtttcctgatgttgatagttcttggaaaacttttaatgagattcaaaaactacttggtaaaactgatgggaaagttgtgggggatttaatgacacctactccacttgttgttcatgataccacaaaccttgaagaagctgtaaggttgttgcttgaaacaaaataccgtaggctgccagtagtcgatgataatgggaaattggttggacttattacaaggggggatgttgttagggctgcccttcagataaaacatgatattaaaaaaatgcaatcaagttga

SEQ ID NO: 42 - protein, 239 aa, Cichorium intybus
MDSIILPAGSISGVVSAAQYRRIPYTSSQTSAFCQRQFLSTRSSPRNSDRDHSRFAAIHSVAADTTNSSPTRDGTYTVADFMTRKANLLVVETTTTVDKALEILVEKRITGFPVVDADWNLVGVVSDYDLLALDSISGGNHSETSLFPDVDSSWKTFNEIQKLLGKTDGKVVGDLMTPTPLVVHDTTNLEEAVRLLLETKYRRLPVVDDNGKLVGLITRGDVVRAALQIKHDIKKMQSS

SEQ ID NO: 43 - DNA, 594 bp, Chlamydomonas reinhardtii
atgcagtctcttgcccagcgcgctagccacgccgtgcgtcccatggggccgcggcgcttgcaagctcggcgtgtggtgccacgggctgcctccacggagctgtccttgagcacggtgaaggacgtgatgagctcggggacgctatactcggtctcgccagaggacacggtggacgcggcccttgagattctcgtgaacaatcgcattacgggcctacccgtgctggacacggagggtcgcgtggtgggcgtggtgtcggactttgacttgctggcgctagacgcggtgggccgcgtaaatgacgacaacatgctcttccccagcgccgagcagagctggcaggcgttcaaggaggtgaagaagatgctggccaagaccgccggcaagaagatcaaggacgtcatgacgcccaagcccatcaccgtgcgccccgagaccaacctcaacgacgccaccagcatcctgatcagcaagaagatccggaggctgccagtggtggacgagcacggcaagctggtggggctgatcagccgcggcaacatcgtcaaggcagcgctagcggcgcgcaaggccgctgccgcctcctccaactag

SEQ ID NO: 44 - protein, 197 aa, Chlamydomonas reinhardtii
MQSLAQRASHAVRPMGPRRLQARRVVPRAASTELSLSTVKDVMSSGTLYSVSPEDTVDAALEILVNNRITGLPVLDTEGRVVGVVSDFDLLALDAVGRVNDDNMLFPSAEQSWQAFKEVKKMLAKTAGKKIKDVMTPKPITVRPETNLNDATSILISKKIRRLPVVDEHGKLVGLISRGNIVKAALAARKAAAASSN

SEQ ID NO: 45 - DNA, 846 bp, Citrus sinensis
atgagctcgatttcgattcccagttgtctcacactcgcgcgactcaacgccaacggcgttattaactccgttcctcaccttcagttaccgatcacggtggccactccttcgcatctctccaaacgactacgttttttcactgtctctcgcgaggtgaaggcttttgctcacaacggcgtcgggatcaccaactccgttcctccgagaaatggaacgtacacagttggtgacttcatgacgaagaaagaggatctacacgctgtaaagactactacaacggtcgatgaagctttagaacgtcttgtggagaagagaattaccggttttcctgtgattgatgacgactggaagttggttggtgttgtttcagattatgacttgctagcacttgattccatttcaggtggcaatcaaaatgacacaagcttgtttcctaatgtcaatagcacttggaaaacatttaaagagttacaaagacttcttagtaagactaatggaaaaagttgttggggacttgatgaaccccggctccgctcctttgttcatgaaaacccccaatttaaaaaaaagctgctagggttgttggttggaaacaaaataaccgtaaaaatgcccggtattaaaaggggtggaggggaaacctgggttgggaccccaccaaaaaaaaggaaaggggggttaagagccggccccccccggaaaaaaaagggggaaggggggaaaaaaataaaacaaaattatcaacgtaatcccacaatagaaaatctggggggtttttgggaacctcccaaaaaaaaaaacttttttttttttttttttttttggcccccccccaggggattgtaa

SEQ ID NO: 46 - protein, 281 aa, Citrus sinensis
MSSISIPSCLTLARLNANGVINSVPHLQLPITVATPSHLSKRLRFFTVSREVKAFAHNGVGITNSVPPRNGTYTVGDFMTKKEDLHAVKTTTTVDEALERLVEKRITGFPVIDDDWKLVGVVSDYDLLALDSISGGNQNDTSLFPNVNSTWKTFKELQRLLSKTNGKSCWGLDEPRLRSFVHENPQFKKKLLGLLVGNKITVKMPGIKRGGGETWVGTPPKKRKGGLRAGPPRKKKGEGGKKIKQNYQRNPTIENLGGFWEPPKKKNFFFFFFFWPPPRGL

SEQ ID NO: 47 - DNA, 714 bp, Citrus sinensis
atggactcgattgtactcccacactcaatctccgtcgcgcgcctacgcgcccccgctgccggccgtaccagtggtcgtacttcattcgctctccagctgccatgcctacttctctctcgtcccggttgtagagtgttctcagtgttggcgacctcatccgatcgcgtctcggcgcttcgcaggtcctcggctgttttcgccagtggtaccttgacggccaactccgctgcgccgagcagtggagtttatacggttggtgatttcatgacaacaaaagaggagttgcatgtggtaaaacctacaacgactgtagatgaagctctggaaattcttgtagagaagagaattactggttttcctgtgattgacgatgactggaaattggttggtcttgtatctgattatgacttgttagcattggactctatatcaggcagcggacgagctgataacagcatgtttcccgaagttgacagcacttggaaaacattcaacgaggtgcagaagttgcttagtaaaaccaatgggaagatggtgggtgacttaatgacgccagccccagtcgtagttcgggaaacgactaatcttgaggatgctgctagattgttacttgagacaaaataccgcagacttccagtcgtggatgctgatggttggaattatcacaagaggaaatgtagtaagggcggctcttcaaataaaacatgcgactga

SEQ ID NO: 48 - protein, 237 aa, Citrus sinensis
MDSIVLPHSISVARLRAPAAGRTSGRTSFALQLPCLLLSRPGCRVFSVLATSSDRVSALRRSSAVFASGTLTANSAAPSSGVYTVGDFMTTKEELHVVKPTTTVDEALEILVEKRITGFPVIDDDWKLVGLVSDYDLLALDSISGSGRADNSMFPEVDSTWKTFNEVQKLLSKTNGKMVGDLMTPAPVVVRETTNLEDAARLLLETKYRRLPVVDADGWNYHKRKCSKGGSSNKTCD

SEQ ID NO: 49 - DNA, 712 bp, Centaurea solstitialis
atggcctcaattccgccgcttctagatcctctctccgcctctaacctccgttctaccaccgtcttccaccaccaccagatcccttgcctaatctcctctcctcctccatcagttatctacgggaggcttccatcttcttcttacaccatccatccgctttctcgcacacctactttcaccgtcaccggagctccacctaccttgaccggtaattccgtaccgccaagaaatggcgtgttgattgtgggtgatttcatgactactagagaggagttacaggtcgtgaaggccacgacgactgtaaacgaagctctggaagctcttgtagaacacagaatcaccggctttcccgtaattgacgatgactggaaattggttgggctggtttcagattatgacttattagcactgggctctgtatcaggtgcaactaaatctgatacaaacatgttcccggaggtcgatagcacttggaagacgttcaacgaggtacaaaaattgctcattaaaaccgatggaaagcttgttggtgatttaatgacacccgcgcctttagtagttcgtgaaaatactaatcttgaagatgctgccagattgttgcttgagaccaaatatcgtcgccttccggttgtagatggtgaaggacagctggttggaattatcacgagaggaaatgtcgtatgagccgctctacaaataatacaggcgggtg

SEQ ID NO: 50 - protein, 237 aa, Centaurea solstitialis
  misc_feature (237)..(237): Xaa can be any naturally occurring amino acid
MASIPPLLDPLSASNLRSTTVFHHHQIPCLISSPPPSVIYGRLPSSSYTIHPLSRTPTFTVTGAPPTLTGNSVPPRNGVLIVGDFMTTREELQVVKATTTVNEALEALVEHRITGFPVIDDDWKLVGLVSDYDLLALGSVSGATKSDTNMFPEVDSTWKTFNEVQKLLIKTDGKLVGDLMTPAPLVVRENTNLEDAARLLLETKYRRLPVVDGEGQLVGIITRGNVVAALQIIQAGX

SEQ ID NO: 51 - DNA, 726 bp, Centaurea solstitialis
atggattcgatcatcttaccggcggccagtttttccggcgttgttgtttctgcttcacaattacgccatctaccgtctccatcttcttcacacactagcaccggtttccgtctgccgaaatcatgccttaatcgttcctcacgacggttctccaaccgcgatcatactcgtttaccggcggttcattccgtcgctgctcattccaccaattccacgcctccaagagatgaaatacacacagttggtgattttatgacgaaaaaagcggacttacttgtggtagaaacgacaacaacagttgacaaggcattagagcttcttgtggagaaaagaattaccggatttccagtggttgatgctgattggaatttagttggcgttgtatcagattatgacttgttagcgcttgacaagatatcaggtggtagtcatggtgacacaagtttgtttcctgatgttgatagttcctggaaaacgttcaacgagattcagaaactactcggtaaaactgatgggaaagttgtgggggacttgatgacacctgctccacttgttgttcatgaaaccactaactttgaggaagctgtaaggttgttgcttgaaacaaaataccgtcggctaccggtggtggatgttgatggcaagctggttggacttattacaagaggagatgttgttcgggctgcccttcagataaaagatgctattaagaagatgcaattatga

SEQ ID NO: 52 - protein, 241 aa, Centaurea solstitialis
MDSIILPAASFSGVVVSASQLRHLPSPSSSHTSTGFRLPKSCLNRSSRRFSNRDHTRLPAVHSVAAHSTNSTPPRDEIHTVGDFMTKKADLLVVETTTTVDKALELLVEKRITGFPVVDADWNLVGVVSDYDLLALDKISGGSHGDTSLFPDVDSSWKTFNEIQKLLGKTDGKVVGDLMTPAPLVVHETTNFEEAVRLLLETKYRRLPVVDVDGKLVGLITRGDVVRAALQIKDAIKKMQL

SEQ ID NO: 53 - DNA, 723 bp, Centaurea solstitialis
atggcctcaattcctccggtcgtcgatcacctctccgtttctctgcaccgtactaccaccgccttcttccgccatcagatgcctagtcgtctaatctcatctcatccagtgctcgcctccagagattcttcttcttcttgccggatttctggctctcgtagaccggcgctcaccgtggctgcagccgcaaccgccactttgatgtctaattccgtgccgcagaaaagtggagtattgattgtgggtgattttatgaccaagaaagaggatttgcatgtggtaaagcccacaacaactgtagatgaagcattgaaagctcttgtggagaatagaataactggttttccagtgattgatgatgactggaaattggttggggtggtatcagattatgacttgctagcactggattctatatcaggcacttcacgagctgaaaccaacatgttccctgaggtggatagcacttggaaaacattcaacgaggtacaaaggctactcagtaaaaccgacgggaaagtggttggtgatttgatgacatctgtcccgttagtagttcgtgaaaccactaatctcgaggatgctgccagattgttgcttgaaactaaatatcggcgactgcctgttgtagatggcgaaggaaagttggtcgggattattacacgaggaaatgtggtaagagctgccccgaaaataaaaaaagagaacgaaacgaaagcatga

SEQ ID NO: 54 - protein, 240 aa, Centaurea solstitialis
MASIPPVVDHLSVSLHRTTTAFFRHQMPSRLISSHPVLASRDSSSSCRISGSRRPALTVAAAATATLMSNSVPQKSGVLIVGDFMTKKEDLHVVKPTTTVDEALKALVENRITGFPVIDDDWKLVGVVSDYDLLALDSISGTSRAETNMFPEVDSTWKTFNEVQRLLSKTDGKVVGDLMTSVPLVVRETTNLEDAARLLLETKYRRLPVVDGEGKLVGIITRGNVVRAAPKIKKENETKA

SEQ ID NO: 55 - DNA, 702 bp, Chlorella vulgaris
atggccaacgcagcgtctttcagtggtcggcttcccagcataagcggaaggacagcatgcagtgcaccctataacacgctcccatctcgctttctgcctgttcccagcccggcgtcatacttgcttccaagcaggcgccttaaagtttcaaggctttcccttgtattgcccagagcagtactagctaattatgcgttacctgagatcgggggaccacacaaggtggatgacgttatgacgaagggtaagattttcagcgctcgagtgaacacatctgtggacgaagccctggagctcatggtcaagcacagagtgtctggccttccagtcctggacgagtcaaatagggtggttggagtagtgtcagactatgatttgctctcgctggatgcggtttctggcaaaatgcaggaagccggctttttcccaagggcagacacaaactgggactccttccacgaagtgcagaagcttgtcctcaagaacgccggcagggtggtgggcgacgtgatgacagagaatccagtggtcgtccgcgccaacactgacatgacatcagccgcccgcatgctcctggacacccgggtgaggaggttgcctgttgtggacgatgatggccgcctggtgggcattttcacaaggggtgacgtcatcaaggctgctctggatgtgcgccgcgcggctgccggccgctccggctga

SEQ ID NO: 56 - protein, 233 aa, Chlorella vulgaris
MANAASFSGRLPSISGRTACSAPYNTLPSRFLPVPSPASYLLPSRRLKVSRLSLVLPRAVLANYALPEIGGPHKVDDVMTKGKIFSARVNTSVDEALELMVKHRVSGLPVLDESNRVVGVVSDYDLLSLDAVSGKMQEAGFFPRADTNWDSFHEVQKLVLKNAGRVVGDVMTENPVVVRANTDMTSAARMLLDTRVRRLPVVDDDGRLVGIFTRGDVIKAALDVRRAAAGRSG

SEQ ID NO: 57 - DNA, 630 bp, Euphorbia esula
atggcgtccgtaccgttaacagctacttccccttgtctgcttcactcccttttcatctctccccacacaccatgtctccttcctccctcctccatgcagttacgacgccgtttatgctctccccgtcggcccgattttcctcgtcggatctccgtcgttgctttaacaaccaacggcatgccgagaaatggagcatttactactgtcggtgatattatgactagaaaggaggatttgtttgctgtgaaaactacaactactgttgatgaagcactagaggctcttgtggagaagaaattatctggttttcctgtggttgatgatgatgggacattggttggtgttgtttcagattatgacttgttagctctaaactctatatcaggtggcaatcaaggcagcacaaacttgtttcctgatacggataggtcttggaaaacattcaatgagatgcaaaaactagttactaagaacaatggaaaagttgtgggtgatctgatgactcccgcccctctagttgtcaacgaaaccaccaatttggaggatgctgctaggttgctgctagactcaaaacaccatcgccttccagtggtagatgacaaaggaaagctggtaagtaacaagtactaa

SEQ ID NO: 58 - protein, 209 aa, Euphorbia esula
MASVPLTATSPCLLHSLFISPHTPCLLPPSSMQLRRRLCSPRRPDFPRRISVVALTTNGMPRNGAFTTVGDIMTRKEDLFAVKTTTTVDEALEALVEKKLSGFPVVDDDGTLVGVVSDYDLLALNSISGGNQGSTNLFPDTDRSWKTFNEMQKLVTKNNGKVVGDLMTPAPLVVNETTNLEDAARLLLDSKHHRLPVVDDKGKLVSNKY

SEQ ID NO: 59 - DNA, 678 bp, Gossypium hirsutum
atggacacaattctccataccgaacctctatctctcactcgcttacgcgccacttcgaattccagcgcttccattcaccatatgccttgccagctcatcttccgtcctttccaccgcctctcctttcctttatccaccgtcaacgctggctccagttctcgcaggtcatccgcttttgttgtcgccgctagcggcactctcaccgccaattccgtttcgccgagaggtggagtatatacagttggggatttcatgacgggaaaagaggatttgcatgttgtaaagccaacaacaactgttgatgaagcactggaagctcttgttgaacacagaatcaccggttttcctgttatcgatgatgattggaaattggttggacttgtttctgattatgacttgctagcattggactccatatctgggcggcggactgagaatgatctgtttcctgaagttgatagcacttggaaaactttcaacgagatacagaagttactcaacaagacgaatggacaggtggttggtgatttaatgacaccagctccattagttgtacgtgaaacaactaatctcgaggatgctgctaaattattgcttgagacaaaataccgaagacttcctgttgttgatgtagagggcaagctggtgggtatcatcacaagaggaaatgttcgttag

SEQ ID NO: 60 - protein, 225 aa, Gossypium hirsutum
MDTILHTEPLSLTRLRATSNSSASIHHMPCQLIFRPFHRLSFPLSTVNAGSSSRRSSAFVVAASGTLTANSVSPRGGVYTVGDFMTGKEDLHVVKPTTTVDEALEALVEHRITGFPVIDDDWKLVGLVSDYDLLALDSISGRRTENDLFPEVDSTWKTFNEIQKLLNKTNGQVVGDLMTPAPLVVRETTNLEDAAKLLLETKYRRLPVVDVEGKLVGIITRGNVR

SEQ ID NO: 61 - DNA, 630 bp, Gossypium hirsutum
atgggttccatttctttcgttaattctcaaaccctgaagctattcccttctttttattcctttcttcattctaagcaaccctgcattgtctccatgtaccattattcccataaagtggcactggcaccctccttgtctctccccaaacccaaagatggctcttttcgtcttgctgctgaactcatcaccaactctgttccctcaagaaatggaaattataccgtgggtgattttatgaccaggaaagaggatttacatgttgtcaaagctacaacaagtgtggatgaagcattggaggcacttgtggagaagagagttactggtttcccagtgatcgatgatgactggaatttggttggcgttgtttccgattatgatttgttggcactcgactcgatttcaggtagcagtcaaaatgacacaaccttgtttcctaatgttgatagttcttggaaaacattcaatgaaatacagaaattgatgaacaaaaataacggaaacgtggtcggagacttgatgacaccttcaccgctcgttgttcgtgaaacaacaaacctggaagatgctgctaggctattgctcgaaaccaatatcgccaactacccgtgggaaaaaatgatggcaaactaa

SEQ ID NO: 62 - protein, 209 aa, Gossypium hirsutum
MGSISFVNSQTLKLFPSFYSFLHSKQPCIVSMYHYSHKVALAPSLSLPKPKDGSFRLAAELITNSVPSRNGNYTVGDFMTRKEDLHVVKATTSVDEALEALVEKRVTGFPVIDDDWNLVGVVSDYDLLALDSISGSSQNDTTLFPNVDSSWKTFNEIQKLMNKNNGNVVGDLMTPSPLVVRETTNLEDAARLLLETNIANYPWEKMMAN

SEQ ID NO: 63 - DNA, 720 bp, Gossypium hirsutum
atggacacaattctccataccgaacctctatctctcactcgcttacgcgccacttcgaattccagcgcttccattcaccatatgccttgccagctcatcttccgtcctttccaccgcctctcctttcctttatccaccgtcaacgctggctccagttctcgcaggtcatccgcttttgttgtcgccgctagcggcactctcaccgccaattccgtttcgccgagaggtggagtatatacagttggggatttcatgacgggaaaagaggatttgcatgttgtaaagccaacaacaactgttgatgaagcactggaagctcttgttgaacacagaatcaccggttttcctgttatcgatgatgattggaaattggttggacttgtttctgattatgacttgctagcattggactccatatctgggcggcggactgagaatgacctgtttcctgaagttgatagcacttggaaaactttcaacgagatacagaagttactcaacaagacgaatggccaggtggttggtgatttaatgacaccagctccattagttgtacgtgaaacaactaatctcgaggatgctgctagattattgcttgagacaaaataccgcagacttcctgttgttgatgtagagggcaagctggtgggtatcatcacaagaggaaatgtcgttagagccgcccttcaaataaagcgtgaaattgaaggaaaagcttaa

SEQ ID NO: 64 - protein, 239 aa, Gossypium hirsutum
MDTILHTEPLSLTRLRATSNSSASIHHMPCQLIFRPFHRLSFPLSTVNAGSSSRRSSAFVVAASGTLTANSVSPRGGVYTVGDFMTGKEDLHVVKPTTTVDEALEALVEHRITGFPVIDDDWKLVGLVSDYDLLALDSISGRRTENDLFPEVDSTWKTFNEIQKLLNKTNGQVVGDLMTPAPLVVRETTNLEDAARLLLETKYRRLPVVDVEGKLVGIITRGNVVRAALQIKREIEGKA

SEQ ID NO: 65 - DNA, 720 bp, Gossypium hirsutum
atggacacaattctccataccgaacctctatctctcactcgcttacgcgccacttcgaattccaccgcttccattcaccatatgccttgccagctcatcttccgtcctttccaccgcctttcctttcctttatccaccgtcaacgctggctccagttctcgcaggtcatccgcttttgttgtcgccgctagcggcactctcaccgccaattccgtttcgccaagaggtggagtatatacagttggggatttcatgacgagaaaagaggatttgcatgttgtaaagccaacaacaactgttgatgaagcactggaagctcttgttgaacacagaatcaccggttttcctgttattgatgatgattggaaattggttggacttgtttctgattatgacttgctagcattggactccatatctgggcggcggactgagaatgacctgtttcctgaagttgatagcacttggaaaactttcaacgaggtacagaagttactcaacaagacgaatggccaggtggttggtgatttaatgacaccagctccattagttgtacgtgaaacaactaatctcgaggatgctgctagattattgctcgagacaaaataccgcaggcttccggttgttgatgtagagggcaagctggtgggtatcatcacaagaggaaatgtcgttagagccgcccttcaaataaagcgtgaaattgaaggaaaagcttaa

SEQ ID NO: 66 - protein, 239 aa, Gossypium hirsutum
MDTILHTEPLSLTRLRATSNSTASIHHMPCQLIFRPFHRLSFPLSTVNAGSSSRRSSAFVVAASGTLTANSVSPRGGVYTVGDFMTRKEDLHVVKPTTTVDEALEALVEHRITGFPVIDDDWKLVGLVSDYDLLALDSISGRRTENDLFPEVDSTWKTFNEVQKLLNKTNGQVVGDLMTPAPLVVRETTNLEDAARLLLETKYRRLPVVDVEGKLVGIITRGNVVRAALQIKREIEGKA

SEQ ID NO: 67 - DNA, 687 bp, Glycine max
atggactcggttctcttgcacttgcatctccacactctccctcctctctcctccgccactcaccgccctctctgccaccctctcgccgcctcctccgcttctttccaccgctcttctcctcctctcccacgcttccgcttctcgccgcttctcgccgctaacaccctcaccgctaataacatctcgccaagaagtggactatacactgttggtgactttatgacaaagaaagaggatttacatgtggtgaaaccgacaacatctgtggatgaagctttagaaattcttgttgaaaacaggataactggttttcccgtgattgatgataactggaaactggttggtgttgtttcagattatgatttgttagcactggactctatatcaggtcacgggttaaaggataacatgtttccagaagttgacagtacttggaaaactttcaatgaggttcaaaagctgctaagtaagaccaacggaaagttgattggtgaattgatgaccactgcccctatggtcgttcgtgagaccaccaatctcgaggatgctgcgaggttgttgctagagaccaaatttcgacgccttccagttgtagatgctgagggtagactggttgggattatcacaagaggaaatgttgtaagagccgcactccacatgaaacaagcgaaccaaaagaaagcatga

SEQ ID NO: 68 - protein, 228 aa, Glycine max
MDSVLLHLHLHTLPPLSSATHRPLCHPLAASSASFHRSSPPLPRFRFSPLLAANTLTANNISPRSGLYTVGDFMTKKEDLHVVKPTTSVDEALEILVENRITGFPVIDDNWKLVGVVSDYDLLALDSISGHGLKDNMFPEVDSTWKTFNEVQKLLSKTNGKLIGELMTTAPMVVRETTNLEDAARLLLETKFRRLPVVDAEGRLVGIITRGNVVRAALHMKQANQKKA

SEQ ID NO: 69 - DNA, 630 bp, Glycine max
atggactcggttctcttgcacttgcatctccacactctccctcctctctcctccgccactcaccgccctctctgccaccctctcgccgcctcctccgcttctttccaccgctcttctcctcctctcccacgcttccgcttctcgccgcttctcgccgctaacaccctcaccgctaataacatctcgccaagaagtggactatacactgttggtgactttatgacaaagaaagaggatttacatgtggtgaaaccgacaacatctgtggatgaagctttagaaattcttgttgaaaacaggataactggttttcccgtgattgatgataactggaaactggttggtgttgtttcagattatgatttgttagcactggactctatatcaggtcacgggttaaaggataacatgtttccagaagttgacagtacttggaaaactttcaatgaggttcaaaagctgctaagtaagaccaacggaaagttgattggtgaattgatgaccactgcccctatggtcgttcgtgagaccaccaatctcgaggatgctgcgaggttctttcatctttttcctaatttacccttggaaacatccccctttgctttttccttttttaacttttgtttttag

SEQ ID NO: 70 - protein, 209 aa, Glycine max
MDSVLLHLHLHTLPPLSSATHRPLCHPLAASSASFHRSSPPLPRFRFSPLLAANTLTANNISPRSGLYTVGDFMTKKEDLHVVKPTTSVDEALEILVENRITGFPVIDDNWKLVGVVSDYDLLALDSISGHGLKDNMFPEVDSTWKTFNEVQKLLSKTNGKLIGELMTTAPMVVRETTNLEDAARFFHLFPNLPLETSPFAFSFFNFCF

SEQ ID NO: 71 - DNA, 687 bp, Glycine max
atggactcagctctgtcgcggttgcatctccacaatctccctcctctttcctccgccgctcaccgccctctcttgcagcctctcgccgccgccgcttctttctaccgctcttctcctcctctcccacgcctccgtctctcgccgcttctcgctgctaacaccctcaccgctaatgacgtctcgccaagaagtggactatacactgtcggtgactttatgacaaagaaagaggatttacatgtggtgaaacccacaacatctgtggatgaagctttggagattcttgttgaaaacaggataactggttttcccgtgattgatgataactggaaactggttggtgttgtttcagattatgatttgttagcactggactctatatcaggtcacgggctaaaggataacaacatgtttccagaagttgacagtacttggaaaactttcaatgaggttcaaaagctgctaagtaagaccaacggaaagttgattggtgaattgatgaccactgcccctatggtcgttcgtgagaccaccaatctcgaggatgctgcgaggttgttgctagaaaccaaatttcgacgcctaccagttgtagatgctgagggtagactggttgggattatcacaagaggaaatgttgtaagagccgcactgcacatgaaacaagcgaaccaaaagaaagaatga

SEQ ID NO: 72 - protein, 228 aa, Glycine max
MDSALSRLHLHNLPPLSSAAHRPLLQPLAAAASFYRSSPPLPRLRLSPLLAANTLTANDVSPRSGLYTVGDFMTKKEDLHVVKPTTSVDEALEILVENRITGFPVIDDNWKLVGVVSDYDLLALDSISGHGLKDNNMFPEVDSTWKTFNEVQKLLSKTNGKLIGELMTTAPMVVRETTNLEDAARLLLETKFRRLPVVDAEGRLVGIITRGNVVRAALHMKQANQKKE

SEQ ID NO: 73 - DNA, 669 bp, Glycine max
atgacttcgattcatttgataaacactctcgctgctccgcttcgttctttttctcctccgtcgctttttccgcaatgccattctcctctccgttcttccgctgccccgaaacggcgtcgtttcgctaactcctctgggttccgccttgcttcaagccaaaccgtgaattcggttccgcgtgggaatggaacttacaccgttgctgatttcatgacaaagaagcaagatttgcatgttgtcaaaaccaccactaccgttgatgaagctctggaggctcttgtaaactacagaatcagtggtcttccggtaatcgatgaggtctggaatctggttggagttgtatctgattatgacttgttagctattgattcgatatcaggaggtcctcaaagtgatgcaaacttgttccccaatgttgatagtacttggaaaacattcaatgagttacaaaaactgcttagtaagactaatggccaagttgtcggtgacttgatgactccaactccacttgttgttcatgaatcaactagtcttgaggaagctgctaggctgttacttgaaacaaaatatcgtcgactacctgtggtagatgatgatggaaagctggttggacttattacacggggaaacattgttaaggcagctctactatcaaaacgtgctggatag

SEQ ID NO: 74 - protein, 222 aa, Glycine max
MTSIHLINTLAAPLRSFSPPSLFPQCHSPLRSSAAPKRRRFANSSGFRLASSQTVNSVPRGNGTYTVADFMTKKQDLHVVKTTTTVDEALEALVNYRISGLPVIDEVWNLVGVVSDYDLLAIDSISGGPQSDANLFPNVDSTWKTFNELQKLLSKTNGQVVGDLMTPTPLVVHESTSLEEAARLLLETKYRRLPVVDDDGKLVGLITRGNIVKAALLSKRAG

SEQ ID NO: 75 - DNA, 687 bp, Glycine max
atggactcagctctgtcgcggttgcatctccacaatctccctcctctttcctccgccgctcaccgccctctcttgcagcctctcgccgccgccgcttctttctaccgctcttctcctcctctcccacgcctccgtctctcgccgcttctcgctgctaacaccctcaccgctaatgacgtctcgccaagaagtggactatacactgtcggtgactttatgacaaagaaagaggatttacatgtggtgaaacccacaacatctgtggatgaagctttggagattcttgttgaaaacaggataactggttttcccgtgattgatgataactggaaactggttggtgttgtttcagattatgatttgttagcactggactctatatcaggtcacgggctaaaggataacaacatgtttccagaagttgacagtacttggaaaactttcaatgaggttcaaaagctgctaagtaagaccaacggaaagttgattggtgaattgatgaccactgcccctatggtcgttcgtgagaccaccaatctcgaggatgctgcgaggttgttgctagaaaccaaatttcgacgcctaccagttgtagatgctgagggtagactggttgggattatcacaagaggaaatgttgtaagagccgcactccacatgaaacaagcgaaccaaaagaaagcatga

SEQ ID NO: 76 - protein, 228 aa, Glycine max
MDSALSRLHLHNLPPLSSAAHRPLLQPLAAAASFYRSSPPLPRLRLSPLLAANTLTANDVSPRSGLYTVGDFMTKKEDLHVVKPTTSVDEALEILVENRITGFPVIDDNWKLVGVVSDYDLLALDSISGHGLKDNNMFPEVDSTWKTFNEVQKLLSKTNGKLIGELMTTAPMVVRETTNLEDAARLLLETKFRRLPVVDAEGRLVGIITRGNVVRAALHMKQANQKKA

SEQ ID NO: 77 - DNA, 678 bp, Glycine max
atgagttcgattcatttgttaaacactcttgctgttccgcttcgttctttttctcctccgtcgctctttccgcaatgccattctcctctccgttcttcttccgctgttccaaaacggcgtcgtttctctaactcctctgggttccgtcttgcttcaagtcaaaccgtgaattcggttccgcgtgcgaatggaacttacaccgtttcggatttcatgacaaagaagcaagatttgcatgttgtcaaaaccaccaccaccgttgatgaagctttggaggctcttgtaaacaacagaatcagtggtcttccggtgatcgatgaggactggaatctggttggagttgtttctgattatgacttattggctattgattcgatatcaggaggtcctcaaagtgatgcaaacttgttccccgacgtcgatagtacttggaaaacgttcaatgagttacaaaagctgcttagtaagactaatggccaagttgttggtgacttgatgactccaactccacttgttgttcatgaatcgactagtcttgaggaagctgctaggctgttacttgaaacaaaatatcgtcgactacctgtggtagatgatgatggaaagctggttggacttattacacggggaaatattgttaaggcggctctactatcaaaacgtgctggagagtggtga

SEQ ID NO: 78 - protein, 225 aa, Glycine max
MSSIHLLNTLAVPLRSFSPPSLFPQCHSPLRSSSAVPKRRRFSNSSGFRLASSQTVNSVPRANGTYTVSDFMTKKQDLHVVKTTTTVDEALEALVNNRISGLPVIDEDWNLVGVVSDYDLLAIDSISGGPQSDANLFPDVDSTWKTFNELQKLLSKTNGQVVGDLMTPTPLVVHESTSLEEAARLLLETKYRRLPVVDDDGKLVGLITRGNIVKAALLSKRAGEW

SEQ ID NO: 79 - DNA, 681 bp, Glycine soja
atggactcagctctgtcgcggttgcatctccacaatctccctcctctttcctccgccgctcaccgccctctcttgcagcctctcgccgccgccgcttctttctaccgctcttctcctcctctcccacgcctccgtctctcgccgcttctcgctgctaacaccctcaccgctaatgacgtctcgccaagaagtggactatacactgtcggtgactttatgacaaagaaagaggatttacatgtggtgaaacccacaacatctgtggatgaagctttggagattcttgttgaaaacaggataactggttttcccgtgattgatgataactggaaactggttggtgttgtttcagattatgatttgttagcactggactctatatcaggtcacgggctaaaggataacaacatgtttccagaagttgacagtacttggaaaactttcaatgaggttcaaaagctgctaagtaagaccaacggaaagttgattggtgaattgatgaccactgcccctatggtcgttcgtgagaccaccaatctcgaggatgctgcgaggttgttgctagaaaccaaatttcgacgcctaccagttgtagatgctgagggtagactggtcgggattatcacaagaggaaatgtttgaagagccgcactgcacatgaaacaagtgaaccaaaaggaa

SEQ ID NO: 80 - protein, 226 aa, Glycine soja
MDSALSRLHLHNLPPLSSAAHRPLLQPLAAAASFYRSSPPLPRLRLSPLLAANTLTANDVSPRSGLYTVGDFMTKKEDLHVVKPTTSVDEALEILVENRITGFPVIDDNWKLVGVVSDYDLLALDSISGHGLKDNNMFPEVDSTWKTFNEVQKLLSKTNGKLIGELMTTAPMVVRETTNLEDAARLLLETKFRRLPVVDAEGRLVGIITRGNVRAALHMKQVNQKE

SEQ ID NO: 81 - DNA, 726 bp, Helianthus ciliaris
  misc_feature (562)..(562): n is a, c, g, or t
  misc_feature (709)..(709): n is a, c, g, or t
atgaactcgatcatgctaccggcggcctgtatctccggcgtcgttacatctgtacagcaccgattgttaccgtcttcatcctcacagactctaggttttcaccggacgcaatttgattctactttttcgtcacgacggttttccgatcgtgatcggagcggtttgccagctgttcgttctgttgctgcttattcgactaattctacaacgcccagagatggaatatacacagttgcagattttatgacaagaaaagccaacttacttgtggtagaaacatcaacacctgttgacaaggcacttgagattctagtggagaaaagaattacaggctttccagtggttgatgctgattggaatttggtcggtgtcgtttcagattatgacttgttagcgcttgattcaatttcaggtggtactcacagcgacacagctttgtttcctgatgttgatagttcctggaaaactttcaatgagatacagaaactacttggtaaaactgacgggaaagttgtcggagatttgatgacacctgctccacttgtcgttcacgaaacctcanatcttgaggatgctgtaaggctgttgcttgaaacaaagtaccgtcgacttccagtcgtcgatgatgatggcaagctggttggacttataactcgaggtgatgttgttagagctgcccttcagatcaaacatgatattaagaagatgncattatcacaagattga

SEQ ID NO: 82 - protein, 241 aa, Helianthus ciliaris
  misc_feature (188)..(188): Xaa can be any naturally occurring amino acid
  misc_feature (237)..(237): Xaa can be any naturally occurring amino acid
MNSIMLPAACISGVVTSVQHRLLPSSSSQTLGFHRTQFDSTFSSRRFSDRDRSGLPAVRSVAAYSTNSTTPRDGIYTVADFMTRKANLLVVETSTPVDKALEILVEKRITGFPVVDADWNLVGVVSDYDLLALDSISGGTHSDTALFPDVDSSWKTFNEIQKLLGKTDGKVVGDLMTPAPLVVHETSXLEDAVRLLLETKYRRLPVVDDDGKLVGLITRGDVVRAALQIKHDIKKMXLSQD

SEQ ID NO: 83 - DNA, 708 bp, Helianthus exilis
atggcctcacttctccgccccataaccctttcccaatccaccgtatctcaccagcagcagcagctgccctgtttaatctcatctcatccttcgcgaatctccacactaccctcttctaattgcatctttacactttcttcttctagacctacacctactctcatcgtcgcagcagcagctaccttcaccggtaattcagtaccgccaagaaatggagttctgattgtgggtgattttatgactacaaaagacgagttacacgtagtaaagcccacaacaacggtagatgaagccctggaagctcttgtaaaatacagaataactggctttcctgtaattgacgatgactggaaattggttgggctggtctcggattatgacttactagcacttgattctgtatcaggtgctatgcgatctgatgcaagcatgttcccggaagttgatagcacctggaagacattcaatgaggtacaaaaactgctgagtaaaaccgacgggaaggtagttggtgatttaatgacacccgcaccgttagtagttcgtccaaataccaatctcgaggatgctgccagattgttacttgaaacaaaatatcggcgtcttccggttgtagacggtgagggaaagctggtgggaattattacaagaggaaatgtagtaagagctgccctacaaataaaaaaggctaacgagaccaaaacatga

SEQ ID NO: 84 - protein, 235 aa, Helianthus exilis
MASLLRPITLSQSTVSHQQQQLPCLISSHPSRISTLPSSNCIFTLSSSRPTPTLIVAAAATFTGNSVPPRNGVLIVGDFMTTKDELHVVKPTTTVDEALEALVKYRITGFPVIDDDWKLVGLVSDYDLLALDSVSGAMRSDASMFPEVDSTWKTFNEVQKLLSKTDGKVVGDLMTPAPLVVRPNTNLEDAARLLLETKYRRLPVVDGEGKLVGIITRGNVVRAALQIKKANETKT

SEQ ID NO: 85 - DNA, 708 bp, Helianthus petiolaris
atggcctcacttctccgccccataaccctttcccaatccaccctatctcaccaccaccagctgccctctttaatctcatctcatccttcgcgaatctccacactaccctcttctaattgcatctttacactttcttctagacctacacctactctcatcgtcgcagcagcagcagcagctaccttcgctggtaattcagtaccgtcaagaaatggagttctgattgtgggtgattttatgactacaaaagacgagttacacgtagtaaagcccacaacaacggtggatgaagccctggaagctcttgtaaaatacagaattactggctttcctgtaattgacgatgactggaaattggttgggctggtctcggattatgacttactagcacttgattctgtatcaggcgctatgcgatctgatacaagcatgttcccggaagttgatagcacctggaagacattcaatgaggtacaaaaactgctgagtaaaaccgacgggaaggtagttggtgatttaatgacacccgcaccgttagtagttcgtccaaataccaatctcgaggatgctgccagattgttacttgaaacgaaatatcggcgtcttccggttgtagatggtgaaggaaagctggtgggaattattacaagaggaaatgtagtaagagctgccctacaaataaaaaaggctaacgagaccaaaacatga

SEQ ID NO: 86 - protein, 235 aa, Helianthus petiolaris
MASLLRPITLSQSTLSHHHQLPSLISSHPSRISTLPSSNCIFTLSSRPTPTLIVAAAAAATFAGNSVPSRNGVLIVGDFMTTKDELHVVKPTTTVDEALEALVKYRITGFPVIDDDWKLVGLVSDYDLLALDSVSGAMRSDTSMFPEVDSTWKTFNEVQKLLSKTDGKVVGDLMTPAPLVVRPNTNLEDAARLLLETKYRRLPVVDGEGKLVGIITRGNVVRAALQIKKANETKT

SEQ ID NO: 87 - DNA, 705 bp, Helianthus petiolaris
atggcctcacttctccgccccataactctttcccaatccaccgtatctcaccaccatcagctgccctctttaatctcatctcatccctcgcgaatctccgcactaccctcttctaattgcatctttacactttcttctagacctactctcgtcgtcgcagcagcagcagcagcagctaccttcaccggtaattcagtaccgtcaagaaatggagttctgattgtgggtgattttatgactacaaaagacgagttacacgtagtaaagcccacaacaacggtagatgaagccctggaagctcttgtaaaatacagaataactggctttcctgtaattgacgatgactggaaattggttgggctggtctcggattatgacttactagcacttgattctgtatcaggcgctatgcgatctgatacaagcatgttcccggaagttgatagcacctggaagacattcaatgaggtacaaaaactgctgagtaaaaccgacgggaaggtagttggtgatttaatgacacccgcaccgttagtagttcgtccaaataccaatcttgaggatgctgccagattgttacttgaaacgaaatatcggcgtcttccggttgtagatggtgaaggaaagctggtgggaattattacaagaggaaatgtagtaagagctgccctacaaataaaaaaggctaacgagaccaaaacatga

SEQ ID NO: 88 - protein, 234 aa, Helianthus petiolaris
MASLLRPITLSQSTVSHHHQLPSLISSHPSRISALPSSNCIFTLSSRPTLVVAAAAAAATFTGNSVPSRNGVLIVGDFMTTKDELHVVKPTTTVDEALEALVKYRITGFPVIDDDWKLVGLVSDYDLLALDSVSGAMRSDTSMFPEVDSTWKTFNEVQKLLSKTDGKVVGDLMTPAPLVVRPNTNLEDAARLLLETKYRRLPVVDGEGKLVGIITRGNVVRAALQIKKANETKT

SEQ ID NO: 89 - DNA, 693 bp, Hordeum vulgare
atgggcgccaggctgctgttactctccttcgattacccggccgtcgctggcggggggcggtctcgtctgtctgcggtaccacggatgtcttccggtgccccacgcgtgcggtccccagcctcatccatccgcgcgtccgcggccaccgccgctagaggcaacctgccgcaccacacctccgtggttgtggaagccggtggagcttacactgttggtgactttatgactaaaagggaacacctccatgttgtgaaaccatccacttcagtagatgaagctcttgagaggctggtggagcatcggataactggctttcctgttaccgatgatcactggaacttggttggtgttgtgtcagattatgatctgttagcactggactcgatatcaggaaatggacaggctgaacctgacatatttcctgaggtggacagcacttggaagacattccgtgagatacaaaagctcttaagcaaaaccaatgggaaagtagttagtgatgttatgacttctgcacctcttgtggtgcgtgaaactactaaccttgaagatgctgcaaggttacttcttgttactaaataccgcaggctgccagtagtagatggttcgggcaaattggttggaatcatcacaagagggaacgttgtcagagctgctcttgaatttaagaaaaatgttgaagggagtctttga

SEQ ID NO: 90 - protein, 230 aa, Hordeum vulgare
MGARLLLLSFDYPAVAGGGRSRLSAVPRMSSGAPRVRSPASSIRASAATAARGNLPHHTSVVVEAGGAYTVGDFMTKREHLHVVKPSTSVDEALERLVEHRITGFPVTDDHWNLVGVVSDYDLLALDSISGNGQAEPDIFPEVDSTWKTFREIQKLLSKTNGKVVSDVMTSAPLVVRETTNLEDAARLLLVTKYRRLPVVDGSGKLVGIITRGNVVRAALEFKKNVEGSL

SEQ ID NO: 91 - DNA, 543 bp, Hordeum vulgare
atgccagcgccggcctctggaaacggcctcgtcccgaataacaacggagtgtacactgttggagacttcatgacgaaaaaggaggatctccatgtcgtcaagccgtcaaccccggttgatgaagcgctcgagatgctggtgcagaacaggatctctggtttccctgttatcgatgacgactggaagttggttggcgttgtctcagattatgatctattagctttggactcaatggcaggatgtggactggccgatacaaattcaagcatgttccctgaagtagatagcacttggaagacatttcgcgagatccagagactcttgagcaaaaccagtggcaaagttatcggtgatgttatgactccctcgcctcttgtggtgcgtgaaactactaacctcgacgctgctgcaaggttgctgcttgaaaccaaataccacagattgcctgttgttgatagcacgggaaaattggttgggatgatcacaagggggaatgtcgtcagagctgctctcaaaataaagaagaaagctgaaggtgcttaa

SEQ ID NO: 92 - protein, 180 aa, Hordeum vulgare
MPAPASGNGLVPNNNGVYTVGDFMTKKEDLHVVKPSTPVDEALEMLVQNRISGFPVIDDDWKLVGVVSDYDLLALDSMAGCGLADTNSSMFPEVDSTWKTFREIQRLLSKTSGKVIGDVMTPSPLVVRETTNLDAAARLLLETKYHRLPVVDSTGKLVGMITRGNVVRAALKIKKKAEGA

SEQ ID NO: 93 - DNA, 678 bp, Lotus japonicus
atgagttcgattcatttgatcagtgctcctccgcttcggtcactatctccgtccctattcccccaaacccattctccggttccatcctccgccgtccccaaacggcgtcgctcctctcactccgctcggttccgccttgcctccggcccaagcgcaaccgtcgattcggttccgcgcgagaatggaacttatacagttgctgatttcatgactaagaagcagaatttgcatgttgccaaaaccaccaccaccgttgatgaagctcttgaagcacttgtcaaaaacagaatcagtggtcttccagtagttgatgatgactggaatctggttggagttgtttcagattatgacttgttagcaattgattccatatcaggtggtaatcaaaacgattcaaacttattccctgacgtcaatagttcttggaaaacattcaatgagatacaaaagcttcttagtaaaactaatggccaagttgttggagacttgatgactccaactccccttgttgttcaagaatcgactaatctggaggatgctgcaaggctgttgcttgaaacaaaatatcgtcgactgcctgtagttgatagagatggaaagctggttggacttattacaaggggaaatatagttaaggcagcattgctgtcaaaacgtgctggtgataggctctcatag

SEQ ID NO: 94 - protein, 225 aa, Lotus japonicus
MSSIHLISAPPLRSLSPSLFPQTHSPVPSSAVPKRRRSSHSARFRLASGPSATVDSVPRENGTYTVADFMTKKQNLHVAKTTTTVDEALEALVKNRISGLPVVDDDWNLVGVVSDYDLLAIDSISGGNQNDSNLFPDVNSSWKTFNEIQKLLSKTNGQVVGDLMTPTPLVVQESTNLEDAARLLLETKYRRLPVVDRDGKLVGLITRGNIVKAALLSKRAGDRLS

SEQ ID NO: 95 - DNA, 669 bp, Lotus japonicus
atggactcggttgttctccatctcgaccgtttccctctactctccgccactcaccgcccaacatggaatccacgcgctgccgcttccttccgctgcttccaccgctcccttcctattccaaccctccgtggctcgccgcttctcgctgccaacaattctgttccgccaaaaaatggagtgtacactgttggtgactttatgacaaagagagaggatttacatgtggtaaagcccacaacaactgtggatgaagctctggaaatgcttgttgaacatagggtaactggttttcccgtgattgatgataagtggaacctagtttgtgttgtttcagattacgacttgttagcactggactctatatcaggtaatgggaggaaggagagtagcatgtttccagaagttgacagttcttggaaaactttcaatgaggtgcagaatctgttgagtaagacaaacgggaaggtaatcggtgaattaatgactactgcccctatggtcgttcgggagaacaccaatcttgaggatgctgccaggttgttgctagaaacaaagtttagacgccttccagttgtagattctgaaggtagactggttgggattatcaccagaggaaatgttgtaggagccgctcttcaaattaaacgagctatccaaaacaaagcatga

SEQ ID NO: 96 - protein, 222 aa, Lotus japonicus
MDSVVLHLDRFPLLSATHRPTWNPRAAASFRCFHRSLPIPTLRGSPLLAANNSVPPKNGVYTVGDFMTKREDLHVVKPTTTVDEALEMLVEHRVTGFPVIDDKWNLVCVVSDYDLLALDSISGNGRKESSMFPEVDSSWKTFNEVQNLLSKTNGKVIGELMTTAPMVVRENTNLEDAARLLLETKFRRLPVVDSEGRLVGIITRGNVVGAALQIKRAIQNKA

SEQ ID NO: 97 - DNA, 708 bp, Lactuca perennis
atggcctcaattcctccgcttctagaccctttatctctctctcaattccgctccgccaccgtcttccaccataacccgctttctctaatctcaccccctccatcatttatctatactctcccatcttctcgcttccttccagtttctcgcagacccactttcaccgtcgccggagcagctaccttgaccggtaattccgtaccgccaagaaatggagtcttgattgtgggtgatttcatgactacaaaagacgaattacatgtggtaaagcccacaacaacagtagacgaagctctagaagctcttgtagaacacagaataaccggatttcctgtaattgatgataattggaaattggttggattggtttcagattatgatttattagcactcgactctgtatcaggccctgcccgacctgatacgggcatgttcccggaggttgatagcacctggaagacatttaatgaggtacaaaatttgctaagtaaaaccgatgggaagttggttggtgatttaatgacacctgcgccattagtagttcgtgaaaatactaatcttgaagatgctgccagattgttgcttgaaaccaaatatcgccgccttccagttgtagatggggagggaaagctggtgggaattattacaagaggaaatgttgtaagagctgccttacaaataaaaaaggctagtgaaatgaaaacataa

SEQ ID NO: 98 - protein, 235 aa, Lactuca perennis
MASIPPLLDPLSLSQFRSATVFHHNPLSLISPPPSFIYTLPSSRFLPVSRRPTFTVAGAATLTGNSVPPRNGVLIVGDFMTTKDELHVVKPTTTVDEALEALVEHRITGFPVIDDNWKLVGLVSDYDLLALDSVSGPARPDTGMFPEVDSTWKTFNEVQNLLSKTDGKLVGDLMTPAPLVVRENTNLEDAARLLLETKYRRLPVVDGEGKLVGIITRGNVVRAALQIKKASEMKT

SEQ ID NO: 99 - DNA, 729 bp, Lactuca saligna
atggcttcaattcctccgcttatcgatcctctatcttcttccctactccgttctacaaccacttccgtccccgccaccgccttcttccaccgtcagatgccgtgtctaacctcatctccttcggtgctcgccgctaggctttcttctcctttccgccttacagatcctcgccgaccatcgctcaccgtcgctgcagctaccactttgatgtccaattccgtgcagccgaaaagtggagttttaatcgtaggtgattttatgaccaaaaaagaggaattacacgtggtaaaacccacaacaactgtagatgaagcacttaagtctcttgtggagaacagaataactggcttccctgtgatcgatgacaattggaaattagttggagttgtatcagattatgacttattagcattggattctatatcagggactgggagagctgacactgacatgttccctgaggtcgatagcacttggaaaacattcaacgaggtacaaaaactactgagtaaaaccgacggaaaagtagttggggatttgatgacgtcagcgccactagtagttcgtgaaaccaccaatctcgaagatgccgcaagattgttgctcgaaactaaatatcgacgcctacctgtcgtagatgatgagggaaagttggtggggattattacgagagggaatgtggtaagagcagccctgaaaataaaaaaagaaaacgaaaagaaagcgtga

SEQ ID NO: 100 - protein, 242 aa, Lactuca saligna
MASIPPLIDPLSSSLLRSTTTSVPATAFFHRQMPCLTSSPSVLAARLSSPFRLTDPRRPSLTVAAATTLMSNSVQPKSGVLIVGDFMTKKEELHVVKPTTTVDEALKSLVENRITGFPVIDDNWKLVGVVSDYDLLALDSISGTGRADTDMFPEVDSTWKTFNEVQKLLSKTDGKVVGDLMTSAPLVVRETTNLEDAARLLLETKYRRLPVVDDEGKLVGIITRGNVVRAALKIKKENEKKA

SEQ ID NO: 101 - DNA, 708 bp, Lactuca saligna
atggcctctatccctccgcttctagacccattatctctctctcaattccgttccgccaccgtcttccaccatcatccgctttctccaatctcgccccctccatcatttatctatactctcccatcttctcgcctccttccagtttctcgcagacccactttcaccgtcgccggagcagctaccttgaccggtaattccgtaccgccaagaaatggagtcttaattgtgggcgatttcatgactacaaaagaggagttacatgtcgttaagcccacaacaacagtagacgaagctttagaagctcttgtagaacacagaatcaccggatttcctgtaattgatgataactggaaattggttggattggtttcagattatgacttattagcactggactctgtatcaggccctgcccgacctgatacgggcatgttcccggaagttgatagcacctggaagacatttaatgaagtacaaaatttgctaagcaaaactgatgggaagttggttggtgatttaatgactcctgcgccattagtagttcgtgaaaatactaatcttgaagatgctgccagattgttacttgaaaccaaatatcgccgccttcctgttgtagatggggagggaaagctggtggggattattacaagaggaaatgttgtaagagctgccttacaaataaaaaaggcgagtgaaatgaaaacataa

SEQ ID NO: 102 - protein, 235 aa, Lactuca saligna
MASIPPLLDPLSLSQFRSATVFHHHPLSPISPPPSFIYTLPSSRLLPVSRRPTFTVAGAATLTGNSVPPRNGVLIVGDFMTTKEELHVVKPTTTVDEALEALVEHRITGFPVIDDNWKLVGLVSDYDLLALDSVSGPARPDTGMFPEVDSTWKTFNEVQNLLSKTDGKLVGDLMTPAPLVVRENTNLEDAARLLLETKYRRLPVVDGEGKLVGIITRGNVVRAALQIKKASEMKT

SEQ ID NO: 103 - DNA, 696 bp, Lactuca sativa
atggcttctatccctccgcttctagacccattatctctctctcaattccgttccgccaccctcttccaccatcatccgctttctctaatctcaccccctccatcatttatctatactcacccatcttctcgcctccttccagtttctcgcagacccactttcaccgtcgccggagcagctaccttgaccggtaattccgtaccgccaagaaatggagtcttaattgtgggtgatttcatgactacaaaagaggagttacatgtcgttaagcctacaacaacagtagacgaagctctagaagctcttgtagaacacagaatcaccggatttcctgtaattgatgataactggaaattggttggattggtttcagattatgacttattagcactggactctgtatcaggccctgcccgacctgatacgggcatgttcccggaggttgatagcacctggaagacatttaatgaagtacaaaatttgctaagtaaaactgatgggaagttggttggtgatttaatgacacctgcgccattagtagttcgtgaaaatactaatcttgaagatgctgcaagattgttacttgaaaccaaatatcgccgccttccggttgtagatggggagggaaagctggtggggattattacaagaggaaatgttgtaagagctgccttacaaataaaaaaaggcgagtga

SEQ ID NO: 104 - protein, 231 aa, Lactuca sativa
MASIPPLLDPLSLSQFRSATLFHHHPLSLISPPPSFIYTHPSSRLLPVSRRPTFTVAGAATLTGNSVPPRNGVLIVGDFMTTKEELHVVKPTTTVDEALEALVEHRITGFPVIDDNWKLVGLVSDYDLLALDSVSGPARPDTGMFPEVDSTWKTFNEVQNLLSKTDGKLVGDLMTPAPLVVRENTNLEDAARLLLETKYRRLPVVDGEGKLVGIITRGNVVRAALQIKKGE

SEQ ID NO: 105 - DNA, 735 bp, Lactuca sativa
atggcttcaattcctccgcttaccgatcccctatcttcttccctactccgttctacaaccgcctccgttcccaccaccgccttcttccaccgtcagatgccgtgtctaatctcatctcctcccgtgctcgccgctaggctttcttctccttgccgccttacagatcctcgcagaccatctctcaccgtcgctgcggctactactttgatgtccaattccgcgcagccgaaaagtggagttttaattgtaggtgattttatgaccaaaaaagaggaattacacgtggtaaaacccacaacaactgtagatgaagcacttaaatctctagtggagaacagaataaccggcttccctgtaatcgatgagaactggaaattagttggggttgtatcagattatgacttattagccttggattctatatcagggactgggagagctgacactgacatgttccctgaggtcgatagcacttggaaaacattcaacgaagtacaaaaactactgagtaaaaccgacggaaaagtggttggtgatttgatgacgtcagcgccattagtagttcgtgaaaccaccaatctcgaggatgccgcaagattgttgctcgaaactaaatatcgacgcctacctgtcgtagatgatgagggaaagttggtggggattattacgagagggaatgtggtaagagcagccctaaaaataaaaaaagaaaacgaaatgaaaatgaaagcgtga

SEQ ID NO: 106 - protein, 244 aa, Lactuca sativa
MASIPPLTDPLSSSLLRSTTASVPTTAFFHRQMPCLISSPPVLAARLSSPCRLTDPRRPSLTVAAATTLMSNSAQPKSGVLIVGDFMTKKEELHVVKPTTTVDEALKSLVENRITGFPVIDENWKLVGVVSDYDLLALDSISGTGRADTDMFPEVDSTWKTFNEVQKLLSKTDGKVVGDLMTSAPLVVRETTNLEDAARLLLETKYRRLPVVDDEGKLVGIITRGNVVRAALKIKKENEMKMKA

SEQ ID NO: 107 - DNA, 726 bp, Lactuca serriola
atggcttcaattcctccgcttaccgatcccctatcttcttccctactccgttctacaaccgcctccgttcccaccaccgccttcttccaccgtcagatgccgtgtctaatctcatctcctcccgtgctcgccgctaggctttcttctccttgccgccttacagatcctcgcagaccatctctcaccgtcgctgcggctactactttgatgtccaattccgcgcagccgaaaagtggagttttaattgtaggtgattttatgaccaaaaaagaggaattacacgtggtaaaacccacaacaactgtagatgaagcacttaaatctctagtggagaacagaataaccggcttccctgtaatcgatgagaactggaaattagttggggttgtatcagattatgacttgttagccttggattctatatcagggactgggagagctgacactgacatgttccctgaggtcgatagcacttggaaaacattcaacgaagtacaaaaactactgagtaaaaccgacggaaaagtggttggtgatttgatgacgtcagcgccattagtagttcgtgaaaccaccaatctcgaggatgccgcaagattgttgctcgaaactaaatatcgacgcctacctgtcgtagatgatgagggaaagttggtggggattattacgagagggaatgtggtaagagcagccctaaaaataaaaaaagaaaacgaaatgaaatga

SEQ ID NO: 108 - protein, 241 aa, Lactuca serriola
MASIPPLTDPLSSSLLRSTTASVPTTAFFHRQMPCLISSPPVLAARLSSPCRLTDPRRPSLTVAAATTLMSNSAQPKSGVLIVGDFMTKKEELHVVKPTTTVDEALKSLVENRITGFPVIDENWKLVGVVSDYDLLALDSISGTGRADTDMFPEVDSTWKTFNEVQKLLSKTDGKVVGDLMTSAPLVVRETTNLEDAARLLLETKYRRLPVVDDEGKLVGIITRGNVVRAALKIKKENEMK

SEQ ID NO: 109 - DNA, 708 bp, Lactuca virosa
atggcttctatccctccgcttctagacccattatctctctctcaattccgttcctccaccctcttccaccatcatccgctttctctaatctcaccccctccatcatttatctatactctcccatcttctcgcctccttccagtttctcgcagacccactttcaccgtcgccggagcagctaccttgaccggtaattccgtaccgccaagaaatggagtcttaattgtgggtgatttcatgactacaaaagaagagttacatgtcgttaagcccacaacaacagtagacgaagctctagaagctcttgtagaacacagaataacaggatttcctgtaatcgatgataactggaaattggttggattggtttcagattatgacttattagcactggactctgtatcaggccctgcccgacctgatacgggcatgttcccggaagttgatagcacctggaagacatttaatgaagtacaaaatttgctaagtaaaactgatgggaagttggttggtgatttaatgacacctgcgccattagtagttcgtgaaaatactaatcttgaagatgctgcaagattgttacttgaaaccaaatatcgccgccttccagttgtagatggggagggaaagctggtggggattattacaagaggaaatgttgtaagagctgccttacaaataaaaaaggcgagtgaaatgaaaacataa

SEQ ID NO: 110 - protein, 235 aa, Lactuca virosa
MASIPPLLDPLSLSQFRSSTLFHHHPLSLISPPPSFIYTLPSSRLLPVSRRPTFTVAGAATLTGNSVPPRNGVLIVGDFMTTKEELHVVKPTTTVDEALEALVEHRITGFPVIDDNWKLVGLVSDYDLLALDSVSGPARPDTGMFPEVDSTWKTFNEVQNLLSKTDGKLVGDLMTPAPLVVRENTNLEDAARLLLETKYRRLPVVDGEGKLVGIITRGNVVRAALQIKKASEMKT

SEQ ID NO: 111 - DNA, 726 bp, Lactuca virosa
  misc_feature (698)..(698): n is a, c, g, or t
atggcttcaattcctccacttatcgatcctctaccttcttccctactccgttctacaaccgcctccgttcccaccaccgccttcttccaccgtcagatgccgtgtataatctcatctcctccagtgctcgccgctaggctttcttctccttgccgccttacagatcctcgcagatcatcgctaaccgtcgctgcagctaccactttgatgtccaattccgtgcagccgaaaagtggagttttaattgtaggtgattttatgaccaaaaaagaggaattacacgtggtaaaacccacaacaactgtagatgaagcacttaaatctctcgtggagaacagaataacgggcttccctgtaatcgatgacaactggaaattagttggggttgtatcagattatgacttattagcattggattctatatctgggactgggagagctgacactgacatgttccctgaggtcgatagcacttggaaaacattcaatgaggtacaaaaactactgagtaaaaccgacggaaaagtcgttggtgatttgatgacgtcagcgccattagtagttcgtgaaaccaccaatctcgaggatgccgcaagattgttgctcgaaactaaatatcgacgcctacctgtcgtagatgatgagggaaagttggtggggattattacgagagggaatgtggtaagagcagccctcanaataaaaaaagaaaacgaaatgaaatga

SEQ ID NO: 112 - protein, 241 aa, Lactuca virosa
  misc_feature (233)..(233): Xaa can be any naturally occurring amino acid
MASIPPLIDPLPSSLLRSTTASVPTTAFFHRQMPCIISSPPVLAARLSSPCRLTDPRRSSLTVAAATTLMSNSVQPKSGVLIVGDFMTKKEELHVVKPTTTVDEALKSLVENRITGFPVIDDNWKLVGVVSDYDLLALDSISGTGRADTDMFPEVDSTWKTFNEVQKLLSKTDGKVVGDLMTSAPLVVRETTNLEDAARLLLETKYRRLPVVDDEGKLVGIITRGNVVRAALXIKKENEMK

SEQ ID NO: 113 - DNA, 783 bp, Marchantia polymorpha
atggcagcggagtgtgcctgtttgggtgtggcccgggcgcagttagctggccctgcgattgcggtcgccgggaagggaattagtttgagtgttggttcttgctcggtttcatgccttcctctgaggaccgcttattcccttcagcaagtcgatagcagacggagcgcagatgttgtggctagggcaggttttggagcgaggagtggggcgtcctcgcggtcttccgttagctttgttcccagggccaccgtcgctgacagtccccagtccaagagagcgcaagacttgtacacagtcggcgacttcatgacccgcttggacgagttatatgttgcgaagccaagtacgagtgtcgatgaagctctagaagttcttgtggaaaagcgaattacagggttgcccgtcgtggatgaccacggaaggttggtcggagttgtttcggattacgacttgctggccctggattccatctccgggaagcgaagcgaagagggtggattcttccccgccgcaaacagcacgtggaaggctttcaaggagattcaggtgcttctgaacaagacacatggtaagactgtcggtgagctaatgagtccttctcctctcgtagtgagggagctgacgaatatcgaggatgcggccaggttgctgctcgagaccaaattcagacggttgccagtcgtcgatgatgcaggcaagttagtcggacttctcacgagaggtaatgtggtgagggctgctctggtcatcaagcgggctcaagaacagaagacggcagaatag

SEQ ID NO: 114 - protein, 260 aa, Marchantia polymorpha
MAAECACLGVARAQLAGPAIAVAGKGISLSVGSCSVSCLPLRTAYSLQQVDSRRSADVVARAGFGARSGASSRSSVSFVPRATVADSPQSKRAQDLYTVGDFMTRLDELYVAKPSTSVDEALEVLVEKRITGLPVVDDHGRLVGVVSDYDLLALDSISGKRSEEGGFFPAANSTWKAFKEIQVLLNKTHGKTVGELMSPSPLVVRELTNIEDAARLLLETKFRRLPVVDDAGKLVGLLTRGNVVRAALVIKRAQEQKTAE

SEQ ID NO: 115 - DNA, 666 bp, Medicago truncatula
atgagttcgattcatttgattaacactctcccacttagcactccacatcggatcattttacctcattgccattctttgcttccttcttccgtcctaccaaaacgacaccgttttgcacaatccgctaggttcagtgttgtttcatcccaaaccgttaattcggttccgcgcgcgaatggaacttatacagtttctgatttcatgactaaaaagcataatttgcatgttgttaaaaccactacttccgttgatgaagctttggaggctcttgtcaagaacagaatcagtggtcttccggtgatcgatgaggaatggaatctggttggagttgtttcagattatgacttgttagcaattgatacaatatcaggtagcagtgatgcaagcttattccctgatgtggacagtacttggaaaacattcaatgagatacaaaagctgcttagtaagaccaatggaaaagttgtcggggacttgatgactccaagtccacttgttgttcatgaatccactagtctggaggatgctgccaggctgttgcttgaaacaaaatatcgtcgactacctgtggtagacaaagatggaaagctggttggacttattacaagggggaatattgttaaggcggctctactgtcaaagcgctctggtgagaggctcacatag

SEQ ID NO: 116 - protein, 221 aa, Medicago truncatula
MSSIHLINTLPLSTPHRIILPHCHSLLPSSVLPKRHRFAQSARFSVVSSQTVNSVPRANGTYTVSDFMTKKHNLHVVKTTTSVDEALEALVKNRISGLPVIDEEWNLVGVVSDYDLLAIDTISGSSDASLFPDVDSTWKTFNEIQKLLSKTNGKVVGDLMTPSPLVVHESTSLEDAARLLLETKYRRLPVVDKDGKLVGLITRGNIVKAALLSKRSGERLT

SEQ ID NO: 117 - DNA, 675 bp, Medicago truncatula
atggactcgctcactcttcctttccctacactctcctccgccactccccgtcctattttcaatccacgcgccgctgtcgctttccgatgcttccacacctccgctcatttttcaaagcttcgtggctcgccgctttttgctgctaacaccctcaccgctaattccgttccgccaaaaaatggagtctacactgtcggtgactttatgacaaagaaagatgagttacatacagtgaagcccacaacaaccgtggatgaagctttggattctcttgttgagcacagaataactggttttcccgtgattgatgataactggaagctagttggtgttgtttcagattatgacttgttagctctggactctatttcaggtcaagggcaaacagacaacagcttgtttccagacgttgacagtacttggaaaactttcaatgaagttcagagattgctgagtaagaccaatgggaaggtgatcggtgaattaatgactactgcccctatggttgttcgcgagaccaccaatcttgaggatgctgctagattgttgctagaaacaaaatttcgacgtcttcctgttgttgatgctgagggtagattggttgggattatcacaagaggaaatgttgtaagagctgcgcttcaaatgaaacgagacagccaaaagaaagcatga

SEQ ID NO: 118 - protein, 224 aa, Medicago truncatula
MDSLTLPFPTLSSATPRPIFNPRAAVAFRCFHTSAHFSKLRGSPLFAANTLTANSVPPKNGVYTVGDFMTKKDELHTVKPTTTVDEALDSLVEHRITGFPVIDDNWKLVGVVSDYDLLALDSISGQGQTDNSLFPDVDSTWKTFNEVQRLLSKTNGKVIGELMTTAPMVVRETTNLEDAARLLLETKFRRLPVVDAEGRLVGIITRGNVVRAALQMKRDSQKKA

SEQ ID NO: 119 - DNA, 675 bp, Medicago truncatula
atggactcgctcactcttcctttccctacactctcctccgccactccccgtcctattttcaatccacgcgccgctgtcgctttccgatgcttccacacctccgctcatttttcaaagcttcgtggctcgccgctttttgctgctaacaccctcaccgctaattccgttccgccaaaaaatggagtctacactgtcggtgactttatgacaaagaaagatgagttacatacagtgaagcccacaacaaccgtggatgaagctttggattctcttgttgagcacagaataactggttttcccgtgattgatgataactggaagctagttggtgttgtttcagattatgacttgttagctctggactctatttcaggtcaagggcaaacagacaacagcttgtttccagacgttgacagtacttggaaaaccttcaatgaagttcagagattgcagagtaagaccaatgggaaggtgatcggtgaattaatgactactgcccctatggttgttcgcgagaccaccaatcttgaggatgctgctagattgttgctagaaacaaaatttcgacgtcttcctgttgttgatgctgagggtagattggttgggattatcacaagaggaaatgttgtaagagctgcgcttcaaatgaaacgagacagccaaaagaaagcatga

SEQ ID NO: 120 - protein, 224 aa, Medicago truncatula
MDSLTLPFPTLSSATPRPIFNPRAAVAFRCFHTSAHFSKLRGSPLFAANTLTANSVPPKNGVYTVGDFMTKKDELHTVKPTTTVDEALDSLVEHRITGFPVIDDNWKLVGVVSDYDLLALDSISGQGQTDNSLFPDVDSTWKTFNEVQRLQSKTNGKVIGELMTTAPMVVRETTNLEDAARLLLETKFRRLPVVDAEGRLVGIITRGNVVRAALQMKRDSQKKA

SEQ ID NO: 121 - DNA, 705 bp, Nicotiana tabacum
atggcatctatatcaccgtcgggactctccctcagcagctcctccgccgctctccaccaccagcttccttgcctgctcttcttatctccgccgtgcctaaagtttgctactttcggtaaatgtttcctctccgtccgccgcaagcagttttccgttaccgccagcagcaacactttgacggccaattctgcacagccaacaaatggtgtatatacagtaggtgatttcatgacgagaaaagataagctacatgtggtaaagccatcaacatctgtagatgaagccttggaattgttggtagaacgccgaatcactggtttccctgtggttgatgatgactggaaattggttggtcttgtttctgattatgatctattggctctggactctatatcaggtaccggaggagctgatgcaaatatgttcccggaagtgggcagcaactggaaaacattcaacgaggttcaaaagttgattagtaagaccaaggggaaagtggttggtgatttgatgacacctgctcccctagtagttcgggaatctaccaaccttgaggatgcagcaagacttctactcaaaacaaaataccgacggcttcctgttgttgatagtgaaggtaaactggtgggaataataacaaggggaaacgttgtgagagctgcccttcatataaaacgggtcattgaaatggaaggccagcagtga

SEQ ID NO: 122 - protein, 234 aa, Nicotiana tabacum
MASISPSGLSLSSSSAALHHQLPCLLFLSPPCLKFATFGKCFLSVRRKQFSVTASSNTLTANSAQPTNGVYTVGDFMTRKDKLHVVKPSTSVDEALELLVERRITGFPVVDDDWKLVGLVSDYDLLALDSISGTGGADANMFPEVGSNWKTFNEVQKLISKTKGKVVGDLMTPAPLVVRESTNLEDAARLLLKTKYRRLPVVDSEGKLVGIITRGNVVRAALHIKRVIEMEGQQ

SEQ ID NO: 123 - DNA, 723 bp, Nicotiana tabacum
atggagtccattctcaaatttagctcaatttctccgacttttgtcctcaattctccttttttgccgtatatgctctcttcttccacccgtccccatacaggagatccatccgttgctaaatttcgtcgatgtttacctcaagcgaaactttctccatctctccggccggcgtctctttcttcttccgctgctaatgctgctgctacttcgaattctcagcctccaagagatggacattacacagttggtgactttatgactgggaaagaagatttacatgtagtaaaacctacaactaaagttggtgaagcccttgagatgcttgtggaaaagagagttactgggcttcctgtaattgacgatgactggaatttggttggcgttgtttctgattatgacctactggcacttgactctatatcaggaactggccaagctgatacaaatctgtttcctgatgttgacagtacttggacgacgtttaatgaggttcagaagctactgagcaaaactaatggaaaagttgttggcgatgtcatgacaccaactccattgtctgtccgtgaaaacaccaaccttgaagatgctgcgaggttgttgctccaaacgaagtaccggcggctgcctgttgttgatgttgatggcaaactggttgggattatcacaaggggcaatgttgttagagctgctctacaaataaaacgtactgttgatacacaatga

SEQ ID NO: 124 - protein, 240 aa, Nicotiana tabacum
MESILKFSSISPTFVLNSPFLPYMLSSSTRPHTGDPSVAKFRRCLPQAKLSPSLRPASLSSSAANAAATSNSQPPRDGHYTVGDFMTGKEDLHVVKPTTKVGEALEMLVEKRVTGLPVIDDDWNLVGVVSDYDLLALDSISGTGQADTNLFPDVDSTWTTFNEVQKLLSKTNGKVVGDVMTPTPLSVRENTNLEDAARLLLQTKYRRLPVVDVDGKLVGIITRGNVVRAALQIKRTVDTQ

SEQ ID NO: 125 - DNA, 705 bp, Nicotiana tabacum
atggcgtctgtatcgccgtctggactctgtctccaccgcgcatccgccgcattccaccaccagctgccttgcctgctcttatctctgcctagccacaaacttgctgcttcctctaaatgtttcctgccggtacgcctttcggactctcgcgagaccttttgccttgctgcagccaacactttgacgaccaattctgtcccgcccagaaatggtgtctatacagtaggtgatttcatgactagaaaagaggagttacatgtggtaaagcccacaacatcagtagatgaagccttggaagctctagtggaacacagaatcgctggtttccctgtaattgatgataactggaaattggttggtcttgtttctgactatgatctattggcgctcgactctatatcaggtacaggaacagctgatgcagacatgtttcctgaagtagacagcaattggaaaacattcaatgagattcaaaagttgctaggtaagaccaaagggaaagtggttggtgatctgatgtcacttgctccattagtagttcgtgaatctaccaatcttgaggatgcagcaagacttttactgaaaacgaaatatcgtcggcttcctgtggtagatggtgatggtaagctggtgggaataataacaaggggaaatgtagtaagagcggcccttcaagtaaagcgggccaacgaaatggaaggctga

SEQ ID NO: 126 - protein, 234 aa, Nicotiana tabacum
MASVSPSGLCLHRASAAFHHQLPCLLLSLPSHKLAASSKCFLPVRLSDSRETFCLAAANTLTTNSVPPRNGVYTVGDFMTRKEELHVVKPTTSVDEALEALVEHRIAGFPVIDDNWKLVGLVSDYDLLALDSISGTGTADADMFPEVDSNWKTFNEIQKLLGKTKGKVVGDLMSLAPLVVRESTNLEDAARLLLKTKYRRLPVVDGDGKLVGIITRGNVVRAALQVKRANEMEG

SEQ ID NO: 127 - DNA, 555 bp, Nicotiana langsdorffii x sanderae
atggcatctatatcaccgtcgggactctccctcagcagctcctccgccgctctccaccaccagcttccttgcctgctcttcttatctcctccgtgcctaaagtttgctactttcggtaaatgtttcctctccgtccatcggaagcagttttccgttaccgccagcagcaacactttgacggccaattctgcacagccaacaaatggtgtatatacagtaggtgatttcatgacgagaaaagataagctacatgtggtaaagccatcaacatctgtagatgaagccttggaattgttggtagaacgccgaatcaccggtttccctgtggttgatgatgactggaaattggttggtcttgtttctgattatgatctattggctctggactctatatcaggtacaggaggagctgatgcaaacatgttcccggaagtgggcagcaactggaaaacattcaatgaggttcaaaagctgattagtaagaccaaggggaaagtggttgggggatttgatgacacctgctccattagttgttcgggagtctaccaatcttga

SEQ ID NO: 128 - protein, 184 aa, Nicotiana langsdorffii x sanderae
MASISPSGLSLSSSSAALHHQLPCLLFLSPPCLKFATFGKCFLSVHRKQFSVTASSNTLTANSAQPTNGVYTVGDFMTRKDKLHVVKPSTSVDEALELLVERRITGFPVVDDDWKLVGLVSDYDLLALDSISGTGGADANMFPEVGSNWKTFNEVQKLISKTKGKVVGGFDDTCSISCSGVYQS

SEQ ID NO: 129 - DNA, 708 bp, Oryza sativa
atgggcgccacgctgctgctcctgtgcgccgacttctcggctgttgccggcggccgccggcggccttccctgccctcggagccacggttggcggctcccgctgctgggtcccgtgcgccgccgtcgagagcctccgtccgcccgtccgctgccgccgccccgctcgccgcgcgcggcctgccgcaccacgcctccgtcgctgggcaaaacagtggaatttacactgttggtgattttatgactaaaagggaagaactccatgttgtgaagtcaacaacttcagtcgatgaagcccttgagatgctggtggagcataggataactggctttcctgttattgatgacgagtggaatttggttggcgttgtgtcagattatgatctcttagcactcgattcaatatcaggaaatggacttgcggaagtagacatatttcctgaggtggatagtacttggaagacgttcaatgagatacagaagctcttgagcaaaaccaatgggaaagtcattggtgatgttatgacgtctgcacctcttgtggtgcgtgaaactactaaccttgaagatgctgcaaggttactccttgaaactaagtaccgcaggttacctgtagttgacagttcaggcaaattggttgggatcataacaagagggaacgtcgtcagggctgcccttaaaattaagaaaaagtttgaaggtgaactttga

SEQ ID NO: 130 - protein, 235 aa, Oryza sativa
MGATLLLLCADFSAVAGGRRRPSLPSEPRLAAPAAGSRAPPSRASVRPSAAAAPLAARGLPHHASVAGQNSGIYTVGDFMTKREELHVVKSTTSVDEALEMLVEHRITGFPVIDDEWNLVGVVSDYDLLALDSISGNGLAEVDIFPEVDSTWKTFNEIQKLLSKTNGKVIGDVMTSAPLVVRETTNLEDAARLLLETKYRRLPVVDSSGKLVGIITRGNVVRAALKIKKKFEGEL

SEQ ID NO: 131 - DNA, 684 bp, Oryza sativa
atggacgccacgctgctccgctccgccgatgccgccgtcgccgtccgctccaccaccactgcgcctccgcctcgccctcgcctccaccgccccagtaccctccccctcccgtcctcctgcgcctgcgggcccctccgcgcctacgccgctcccgctgcccccgcgcccgccgcgcacaacaacggagtctacacagttggtgacttcatgaccaaaaggcctaatctccatgtcgttacacctgcaacctcggttgatgaagctctcgagacgctggtgcaacacaagatctctggtttccctgttgttgatgacaccggaaagttggtgggtgttgtctcagattatgatctgttagcacttgactcaatatcaggaagtggactgactggcacaaacacaagcatgtttcctgaggtggatagtacttggaagacatttcgcgagatacagagactcttgagcaaaaccaatggcaaagtcatcgctgatgtgatgacttattcgcctcttgcggttcgtgaaagtaccaaccttgatgctgctacaaggttgctacttgaaaccaaatatcgcagattgcctgttgttgatagcactggtaaattggttgggatgatcacaagggggactgttgtcagagctgccctcaaaataaagaagacagctgaagaaactgcttaa

SEQ ID NO: 132 - protein, 227 aa, Oryza sativa
MDATLLRSADAAVAVRSTTTAPPPRPRLHRPSTLPLPSSCACGPLRAYAAPAAPAPAAHNNGVYTVGDFMTKRPNLHVVTPATSVDEALETLVQHKISGFPVVDDTGKLVGVVSDYDLLALDSISGSGLTGTNTSMFPEVDSTWKTFREIQRLLSKTNGKVIADVMTYSPLAVRESTNLDAATRLLLETKYRRLPVVDSTGKLVGMITRGTVVRAALKIKKTAEETA

SEQ ID NO: 133 - DNA, 783 bp, Physcomitrella patens
atggcggctttgttggtggcctcgagtacgggagtggggttggcagctactgtgggacgaaaggacgcgggttcttgcacctcgtcgaccgcgagaccgcagctggtgcttgtgtcgaaccggaagagcgcatctaatgtggcaggcacttcggtggttcccgtgccggttcatgtatggtctaggggatctagctttccgttgccgcggagtacgatgacggaaaaccctactcctcaaaagcaagaaacatacaccgtgggagattacatgactcctgtttcagaattgtattgtgcaacagtgaacactactattgatgaagcattggaagtgcttgttgaaaagcgaatcactggcatgcccgtgattgatgattttggagcgttggtgggggttgtctccgattacgacttgttggcgctggactcaatatcaggacaaagacaacctgaaactagcttatttccagaagctggcaggacatggaaggcttttaaggagatccagaagctgttgattaaaactaatggaaagaccgtaggagatgtgatgaccccatcaccgcttgttgttagcgagcagaccaaccttgaagatgcagcaagggttttgcttgataccaagtttaggcgcttgccagttgttggtgatgatggaaaattggtcggacttctaaccagaggtaatgttgtaagagctgcacttgttatgaaaagagctgctgaggaagagcttggagggaaaggagccgtggaggacatgttcggtggtgacacgtga

SEQ ID NO: 134 - protein, 260 aa, Physcomitrella patens
MAALLVASSTGVGLAATVGRKDAGSCTSSTARPQLVLVSNRKSASNVAGTSVVPVPVHVWSRGSSFPLPRSTMTENPTPQKQETYTVGDYMTPVSELYCATVNTTIDEALEVLVEKRITGMPVIDDFGALVGVVSDYDLLALDSISGQRQPETSLFPEAGRTWKAFKEIQKLLIKTNGKTVGDVMTPSPLVVSEQTNLEDAARVLLDTKFRRLPVVGDDGKLVGLLTRGNVVRAALVMKRAAEEELGGKGAVEDMFGGDT

SEQ ID NO: 135 - DNA, 804 bp, Physcomitrella patens
atggcggccatgttggtggcctcgagcacggcagtgggagcggcaacttttgcggtgaggaaagacataggaacttctacttcgtcgactgcaagtccgcagctagtatttgcgtcgaaccgcaaggttgtgtctagcgtggcgggcacgctggtggtttccatgcaggtgcatatgcggcccaggggaactagctttatgcttgcgcggagtacgatgatggaaaaccctgctcctcaaaagcaagagccatacacggtgggagattacatgacccctgtttcggatttgtattgtgcaacagtgaataccactattgatgaagcattggaagtgctggttgaaaagcgtatcactggcatgcccgtaattgatgatgctggagcattggtgggggttgtctccgattacgacctgttggcgcttgattcaatatcaggtcaaagacaaccagaaactagtttatttccagaagcaggcaggacctggaaggctttcagggagatccagaagttgttggttaaaaccaatggaaagatggttggagatgttatgactccatcaccactcgttgttcgtgagcacaccaaccttgaggatgcagcaagggttttgcttgataccaagttcaggcgtttgcctgttgtcggtgatgatggaaaattggtaagtttgtgctttttgcatgcatgtcaaattcattgccgtttaatgttctttttagtaaagttgaaagtagcactggatccacaaatctgcatgcatacagaatgctcaagttccaaacttttgttgaccatttaa

SEQ ID NO: 136 - protein, 267 aa, Physcomitrella patens
MAAMLVASSTAVGAATFAVRKDIGTSTSSTASPQLVFASNRKVVSSVAGTLVVSMQVHMRPRGTSFMLARSTMMENPAPQKQEPYTVGDYMTPVSDLYCATVNTTIDEALEVLVEKRITGMPVIDDAGALVGVVSDYDLLALDSISGQRQPETSLFPEAGRTWKAFREIQKLLVKTNGKMVGDVMTPSPLVVREHTNLEDAARVLLDTKFRRLPVVGDDGKLVSLCFLHACQIHCRLMFFLVKLKVALDPQICMHTECSSSKLLLTI

SEQ ID NO: 137 - DNA, 780 bp, Physcomitrella patens
atggcggccatgttggtggcctcgagcacggcagtgggagcggcaacttttgcggtgaggaaagacataggaacttctacttcgtcgactgcaagtccgcagctagtatttgcgtcgaaccgcaaggttgtgtctagcgtggcgggcacgctggtggtttccatgcaggtgcatatgcggcccaggggaactagctttatgcttgcgcggagtacgatgatggaaaaccctgctcctcaaaagcaagagccatacacggtgggagattacatgacccctgtttcggatttgtattgtgcaacagtgaataccactattgatgaagcattggaagtgctggttgaaaagcgtatcactggcatgcccgtaattgatgatgctggagcattggtgggggttgtctccgattacgacctgttggcgcttgattcaatatcaggtcaaagacaaccagaaactagtttatttccagaagcaggcaggacctggaaggctttcagggagatccagaagttgttggttaaaaccaatggaaagatggttggagatgttatgactccatcaccactcgttgttcgtgagcacaccaaccttgaggatgcagcaagggttttgcttgataccaagttcaggcgtttgcctgttgtcggtgatgatggaaaattggtcggacttctaaccagaggcaatgttgtaagagctgcacttattatgaaacgagctgctgagaaagagcttggaggaaaagaagccgtagaggatatgtttggagacacatga

SEQ ID NO: 138 - protein, 259 aa, Physcomitrella patens
MAAMLVASSTAVGAATFAVRKDIGTSTSSTASPQLVFASNRKVVSSVAGTLVVSMQVHMRPRGTSFMLARSTMMENPAPQKQEPYTVGDYMTPVSDLYCATVNTTIDEALEVLVEKRITGMPVIDDAGALVGVVSDYDLLALDSISGQRQPETSLFPEAGRTWKAFREIQKLLVKTNGKMVGDVMTPSPLVVREHTNLEDAARVLLDTKFRRLPVVGDDGKLVGLLTRGNVVRAALIMKRAAEKELGGKEAVEDMFGDT

SEQ ID NO: 139 - DNA, 777 bp, Physcomitrella patens
atggcggccatggtggtggcctcgagcacggcgatggggatgcctgccgtgggtagaagggagttgggtccttgctcatcgcccaccgccaggccgcagctggtgcagttgcccagtcggaagaatgtatccagcgtggtgggtacgtcggtggtcttgggaaaagtgaatgcgcggtccagggaaagtagctttccagtcacacggagtgcgttggtagagaatccttttccgcataaacacgagtcatatacggtgggtgacttcatgacacctatgacggagttatattgtgcaacagaaaacaccacaatagatgaagcactagaggtccttgtcgataggcgcatcactgggatgcctgtggtcgacgacactggagctttggtgggggttgtctccgattatgatctattagcgcttgactcaatatcagggcaaagacaacctgaaactagtttatttccggaggcaggcaggacgtggaaggcatttaaagagatccagaaattgttagttaaaactaatggaaagacaattggagatgtgatgaccccatcacccctcgttgttcgtaaacaaaccaaccttgaagatgcagcaaaagttttgctggataccaaatttaggcgcttgcctgttgttgatcaggatggtaaattggtgggtcttttgacaagaggtaatgtcgttagagctgcactgtatatgaagcgaactgctgaagatgcgcttggaggaaagaaagctgcagaagatatattcaaagaaatataa

SEQ ID NO: 140 - protein, 258 aa, Physcomitrella patens
MAAMVVASSTAMGMPAVGRRELGPCSSPTARPQLVQLPSRKNVSSVVGTSVVLGKVNARSRESSFPVTRSALVENPFPHKHESYTVGDFMTPMTELYCATENTTIDEALEVLVDRRITGMPVVDDTGALVGVVSDYDLLALDSISGQRQPETSLFPEAGRTWKAFKEIQKLLVKTNGKTIGDVMTPSPLVVRKQTNLEDAAKVLLDTKFRRLPVVDQDGKLVGLLTRGNVVRAALYMKRTAEDALGGKKAAEDIFKEI

SEQ ID NO: 141 - DNA, 534 bp, Prunus persica
atggggaccttcaccgtcggcgatttcatgaccactaaggagtatttgcacgtcgtcaagccctccacgaccgtcgaccaagcattggatgctcttgtggagaagagaattaccggctttcctgtgattgacgatgactggaaactcgttggtgttgtttcagattatgacttgttagcgttagactccatatctggaaacataaaaggtggtcaaagtgacacaaacttgtttccagatgttgatagttcttggaaaacattccacgagatacagaaactgcttagcaagaccaacggcaaagttgttggtgacgtgatgacacctgctccacttgttgttcgtgaaaccaccaacctagaagatgctgctaggttgttgcttgcaacaaaatatcgccgactgccagttgtagatagtgaggggaagctggttgggatcattacgaggggaaacgttgttaaagctgccctacagataaacgtgctggtgaaaaatgagtttagttcaggggaacattggcggagctcatag

SEQ ID NO: 142 - protein, 177 aa, Prunus persica
MGTFTVGDFMTTKEYLHVVKPSTTVDQALDALVEKRITGFPVIDDDWKLVGVVSDYDLLALDSISGNIKGGQSDTNLFPDVDSSWKTFHEIQKLLSKTNGKVVGDVMTPAPLVVRETTNLEDAARLLLATKYRRLPVVDSEGKLVGIITRGNVVKAALQINVLVKNEFSSGEHWRSS

SEQ ID NO: 143 - DNA, 759 bp, Pinus taeda
atgggggtttattcagttgcagcagaaatggcttctgttgctacttattcaactggctattgctattactgctgctccattccccctaattccaattcaatttccatgacgaggttcccagtgcagttgaatagaggaaccgtggctaagttaagcaaacaccaacaccatcttagcaggggatttacaaagggattcagaggtctccacatcaataccacaagacttcaccttcccaagagcactttaatggcgaccgacgtgccgcataagcaagaagtttttacagtaggtgatttcatgaccaggaaagagtacctgtttgtggtgaagccaacaactatggttgatgaggccttggaaactctagtggcaaaccggatcactggcttaccagtggttgatgatgattggaaactagttggagttgtttctgattatgacttgttagcactggactctatatcaggtgctgggcgaactgaaacaggttttttcccacaagttggaagcacatggaaagctttcaatgaattacagaaattgctaaacaaaactaatgggaagattgttgctgaggtgatgacgccttcaccacttgttgttcgtgaatacaccaaccttgaggatgcagctagattattgctagaaaccaaataccggagattgcctgtagtggacaatagtgggaaactggttggattacttacaagggggaatgtgattaaagctgcactgcaaatgaaacacgctgcttag

SEQ ID NO: 144 - protein, 252 aa, Pinus taeda
MGVYSVAAEMASVATYSTGYCYYCCSIPPNSNSISMTRFPVQLNRGTVAKLSKHQHHLSRGFTKGFRGLHINTTRLHLPKSTLMATDVPHKQEVFTVGDFMTRKEYLFVVKPTTMVDEALETLVANRITGLPVVDDDWKLVGVVSDYDLLALDSISGAGRTETGFFPQVGSTWKAFNELQKLLNKTNGKIVAEVMTPSPLVVREYTNLEDAARLLLETKYRRLPVVDNSGKLVGLLTRGNVIKAALQMKHAA

SEQ ID NO: 145 - DNA, 711 bp, Populus trichocarpa
atggcttctgttgcgaacactttactactctctctgcctccgccactctgtttcaataccaataacaaccagtcaccaccaccttctctttttgtttctaaaaccccaagatcgaaatgttgtcgtcttcgctcctcctccgtccctcgatcaccataccgttcttctgttgcagttgccttgtccactgtagcaaactccgttccggcgagaagtgggatttacacagttggtgattttatgaccaagaaggagggtttatatgtcgttaaagctaacacaaccgttgatgaggcattggaggctcttgtagagaagagaataactgggtttcccgtcattgatgatgactggagattggttggtgttgtttcggattatgacctgttagcgctcgattccatttcaggtggctgtcaaaatgacacaaacttgtttcctaatgttgatagttcttggaagacttttaatgagttacagaaactgttaatcaagaacaacggcaaacttgttggtgatttgatgactcctaatcctctagttgtttatgaaactaccaatctagaggatgctgttaggttgctgcttgaaacaaaatatcggcgactcccagtggtagatgatgatggaaagctggttggaatcattacacggggagacattgttagagctgctctacagataaaaaatgccactgaaaggtcagcatga

SEQ ID NO: 146 - protein, 236 aa, Populus trichocarpa
MASVANTLLLSLPPPLCFNTNNNQSPPPSLFVSKTPRSKCCRLRSSSVPRSPYRSSVAVALSTVANSVPARSGIYTVGDFMTKKEGLYVVKANTTVDEALEALVEKRITGFPVIDDDWRLVGVVSDYDLLALDSISGGCQNDTNLFPNVDSSWKTFNELQKLLIKNNGKLVGDLMTPNPLVVYETTNLEDAVRLLLETKYRRLPVVDDDGKLVGIITRGDIVRAALQIKNATERSA

SEQ ID NO: 147 - DNA, 738 bp, Poncirus trifoliata
atggactcgattgtactcccacactcaatctccgtcgcgcgcctacgctcccccgctgccggccgtaccagtggtagtacttcattcgctctccagctgccatgcctacttctctctcgtcccggttgtagagtgttctcagtgttggcgacctcatccgatcgcgtctcggcgcttcgcaggtcctcggttgtttccgccagtggcaccttgacggccaaccccgctgcgccgagcagtggagtttatacggttggtgatttcatgacaacaaaagaggagttgcatgtggtaaaacctacaacgactgtagatgaagctctggaaattcttgtagagaagagaattactggttttcctgtgattgacgatgactggaaattggttggtcttgtatccgattatgacttgttagcattggactctatatcaggcagcggacgagctgataacagcatgtttcccgaagttgacagcacttggaaaacattcaacgaggtgcagaagttgcttagtaaaaccaatgggaagatggtgggtgacttaatgacgccagccccagtcgtagttcgggaaacgactaatcttgaggatgctgctagattgttacttgagacaaaataccgcagacttccagtcgtggatgctgatggtaagctggttggaattatcacaagaggaaatgtagtaagggcggctcttcaaataaaacgtgagactgaaatgggagcacaatag

SEQ ID NO: 148 - protein, 245 aa, Poncirus trifoliata
MDSIVLPHSISVARLRSPAAGRTSGSTSFALQLPCLLLSRPGCRVFSVLATSSDRVSALRRSSVVSASGTLTANPAAPSSGVYTVGDFMTTKEELHVVKPTTTVDEALEILVEKRITGFPVIDDDWKLVGLVSDYDLLALDSISGSGRADNSMFPEVDSTWKTFNEVQKLLSKTNGKMVGDLMTPAPVVVRETTNLEDAARLLLETKYRRLPVVDADGKLVGIITRGNVVRAALQIKRETEMGAQ

SEQ ID NO: 149 - DNA, 690 bp, Phaseolus vulgaris
atggactcggttctcttccacttccatctccacactctccctccgttttcctccgccactcactctcctctgtaccagccacgcgccgccgctgccgccgcctctttcccccgctcttcccctctccggagcctccgtccaccgccgcttctcgccgccaacaccctcaccgctaattcagtctcgccgagaagtggactgtacactgttggtgactttatgacaaggaaagaggatttacatgtggtaaaacccacaactactgtggacgaagctttggatattcttgttgaaaaaaggataactggttttcctgtgatagatgataactggaaactggttggtgttgtttcagattatgacttgttagcactggactctatatctggtcatgggctaaaggataatagcatgtttccagaagttgacagtacttggaaaacttttaacgagattcaaaagctgctcagtaagaccaacggaaaattgattggtgaattgatgaccactgcccctatggtcgttcgtgagaccaccaatctcgaggatgctgcaaggttgttgctagaaaccaaatttcgacgccttccagttgtagatgctgagggtagactggttgggattatcacaagaggaaatgttgtaagagccgcactgctagtgaaacgagaaaatcaaaagaaagcatga

SEQ ID NO: 150 - protein, 229 aa, Phaseolus vulgaris
MDSVLFHFHLHTLPPFSSATHSPLYQPRAAAAAASFPRSSPLRSLRPPPLLAANTLTANSVSPRSGLYTVGDFMTRKEDLHVVKPTTTVDEALDILVEKRITGFPVIDDNWKLVGVVSDYDLLALDSISGHGLKDNSMFPEVDSTWKTFNEIQKLLSKTNGKLIGELMTTAPMVVRETTNLEDAARLLLETKFRRLPVVDAEGRLVGIITRGNVVRAALLVKRENQKKA

SEQ ID NO: 151 - DNA, 720 bp, Ricinus communis
atggactcttgttccattttccatcaccaacttctcaaccaccctctcacgcgcctacgctccaccgcttcccctactgtcgtttctttcgctcatcagcttccatgccttctctcgtctgccaccgtttcacgccgactctttcatctatcagtcatttcctggccccgtcgttcctctactatctccgccactggcaccttgatggccaattccccaaaaagtggagtgtatacagtgggtgattttatgaccaggaaagaggatctatgtgtggtaaaacctacgacaacagttgatgaagccttgcaaactcttgttgagcacagaattactggttttcctgtgattgatgatgattggaaactggttggtcttgtgtcagattatgacttgttagcattggactctatatcaggtggtggaagaactgataacagcatgtttcccgaggttgacagcacttggaaaacttttaatgaggtgcaaaagttactcagtaaaaccaatgggaagcttgtcggtgacttaatgacaccagccccagttgttgttcgtgaaaccactaatcttgaggatgctgcaagattattgctcgagacaaaataccgaagacttccagttgtagatgctgaaggcaagctggttggaattatcacaagaggaaatgttgtaagagctgcacttgaaataaaacgtgacatggaagggaatgagtaa

SEQ ID NO: 152 - protein, 239 aa, Ricinus communis
MDSCSIFHHQLLNHPLTRLRSTASPTVVSFAHQLPCLLSSATVSRRLFHLSVISWPRRSSTISATGTLMANSPKSGVYTVGDFMTRKEDLCVVKPTTTVDEALQTLVEHRITGFPVIDDDWKLVGLVSDYDLLALDSISGGGRTDNSMFPEVDSTWKTFNEVQKLLSKTNGKLVGDLMTPAPVVVRETTNLEDAARLLLETKYRRLPVVDAEGKLVGIITRGNVVRAALEIKRDMEGNE

SEQ ID NO: 153 - DNA, 687 bp, Sorghum bicolor
atggacattaggctgctggtatccgcggacgccaccctcgccgccgcccgctcccgcccttccacgtccgcgctccagcgccagattgtcgtcccgggccgccgccgggcgtcgtgcaggtccgtccgcgcgcgctccgccgcagctgccgcgccagccgcgggaggcatctccgggcatagcaatggagtgtacacggttggtgacttcatgacaggaagggacaatctccatgttgtccaaccttctacaccggttgaccaagccctggagctgctggtacagcacaagatctctggcttacctgtggttgacgatgatgggaagttggttggggttgtatcagattatgatctgctagctttggattcgatttcaggaaatgaattgcccgatacaaatacaaacatgtttcctgatgtggatagtacatggaagactttccacgagatacagagactattaagcaaaactaatgggaaggtcattggtgatgtaatgacgtcttcacctttagcggtgcgtcaaaatactaatcttgatgctgctacaaggttgctgcttgaaactaaataccggagattacctgtagttgatagcatggggaaactagttgggatgattacaaggggaaacgtcgtcagcgctgccctcaaaataaagaagaaaactgaagaaggtgcttga

SEQ ID NO: 154 - protein, 228 aa, Sorghum bicolor
MDIRLLVSADATLAAARSRPSTSALQRQIVVPGRRRASCRSVRARSAAAAAPAAGGISGHSNGVYTVGDFMTGRDNLHVVQPSTPVDQALELLVQHKISGLPVVDDDGKLVGVVSDYDLLALDSISGNELPDTNTNMFPDVDSTWKTFHEIQRLLSKTNGKVIGDVMTSSPLAVRQNTNLDAATRLLLETKYRRLPVVDSMGKLVGMITRGNVVSAALKIKKKTEEGA

SEQ ID NO: 155 - DNA, 657 bp, Sorghum bicolor
atggacattaggctgctggtatccgcggacgccaccctcgccgccgcccgctcccgcccttccacgtccgcgctccagcgccagattgtcgtcccgggccgccgccgggcgtcgtgcaggtccgtccgcgcgcgctccgccgcagctgccgcgccagccgcgggaggcatctccgggcatagcaatggagtgtacacggttggtgacttcatgacaggaagggacaatctccatgttgtccaaccttctacaccggttgaccaagccctggagctgctggtacagcacaagatctctggcttacctgtggttgacgatgatgggaagttggttggggttgtatcagattatgatctgctagctttggattcgatttcaggaaatgaattgcccgatacaaatacaaacatgtttcctgatgtggatagtacatggaagactttccacgagatacagagactattaagcaaaactaatgggaaggtcattggtgatgtaatgacgtcttcacctttagcggtgcgtcaaaatactaatcttgatgctgctacaaggttgctgcttgaaactaaataccggagattacctgtagttgatagcatggggaaactagtgagtggatccttccttcgttccttgcaatttatgttcatttga

SEQ ID NO: 156 - protein, 218 aa, Sorghum bicolor
MDIRLLVSADATLAAARSRPSTSALQRQIVVPGRRRASCRSVRARSAAAAAPAAGGISGHSNGVYTVGDFMTGRDNLHVVQPSTPVDQALELLVQHKISGLPVVDDDGKLVGVVSDYDLLALDSISGNELPDTNTNMFPDVDSTWKTFHEIQRLLSKTNGKVIGDVMTSSPLAVRQNTNLDAATRLLLETKYRRLPVVDSMGKLVSGSFLRSLQFMFI

SEQ ID NO: 157 - DNA, 630 bp, Saruma henryi
atggattctgttcttctgactaaccctgtccgtctgtctggcgccggcgactcttcatcgtcccgtcatctggcgctttttcggtccgacccacctatatctttcattcggattttctccccatcgcacaacgccgccgcgcgagccaccctccctcgcagggcctcccttgccgtcaggagcagcgcgttgatcaccaactccacacaccctaagagcggagtatacacagtaggtgagtttatgacgaagaaggagcatttacatgttgtaaaacctacaagtactgttgatgaagcattggaagctcttgtggagaacaggattactggctttcccgtgattgatgatgattggaaactggttggactagtttctgattacgatttgttagcactcgactccatatcaggaaatggacgaacagatacaagcttgtttccagaagtcgatagcacttggaaaacgtttaatgagatacaaaagttgcttagtaaaaccaacgggaaagtgattgctgatgtaatgacaccggctcctcttgttgtttgcgaaacaaccaaccttgaagatgttgcaaggtttatctttgaatgccactcgctctcacgtacccatcaatcagtttga

SEQ ID NO: 158 - protein, 209 aa, Saruma henryi
MDSVLLTNPVRLSGAGDSSSSRHLALFRSDPPISFIRIFSPSHNAAARATLPRRASLAVRSSALITNSTHPKSGVYTVGEFMTKKEHLHVVKPTSTVDEALEALVENRITGFPVIDDDWKLVGLVSDYDLLALDSISGNGRTDTSLFPEVDSTWKTFNEIQKLLSKTNGKVIADVMTPAPLVVCETTNLEDVARFIFECHSLSRTHQSV

SEQ ID NO: 159 - DNA, 717 bp, Saruma henryi
atggattctgttcttctgactaaccctgtccgtctgtctggcgccggcgactcttcatcgtcccgtcatctggcgctttttcggtccgacccacctatatctttcattcggattttctccccatcgcacaacgccgccgcgcgagccaccctccctcgcagggcctcccttgccgtcaggagcagcgcgttgatcaccaactccacacaccctaagagcggagtatacacagtaggtgagtttatgacgaagaaggagcatttacatgttgtaaaacctacaagtactgttgatgaagcattggaagctcttgtggagaacaggattactggctttcccgtgattgatgatgattggaaactggttggactagtttctgattacgatttgttagcactcgactccatatcaggaaatggacgaacagatacaagcttgtttccagaagtcgatagcacttggaaaacgtttaatgagatacaaaagttgcttagtaaaaccaacgggaaagtgattgctgatgtaatgacaccggctcctcttgttgtttgcgaaacaaccaaccttgaagatgttgcaagattattgcttgaaacaaaataccgacgactgcccgtggttgatggagctggtaagctggttgggattatcacaaggggatatgttgtacgagctgccttacaaataaagcgtgctacgaaagattacacggtgtaa

SEQ ID NO: 160 - protein, 238 aa, Saruma henryi
MDSVLLTNPVRLSGAGDSSSSRHLALFRSDPPISFIRIFSPSHNAAARATLPRRASLAVRSSALITNSTHPKSGVYTVGEFMTKKEHLHVVKPTSTVDEALEALVENRITGFPVIDDDWKLVGLVSDYDLLALDSISGNGRTDTSLFPEVDSTWKTFNEIQKLLSKTNGKVIADVMTPAPLVVCETTNLEDVARLLLETKYRRLPVVDGAGKLVGIITRGYVVRAALQIKRATKDYTV

SEQ ID NO: 161 - DNA, 582 bp, Saruma henryi
atggattccgtccttctcgccgaccctctctccctctcttcctactctctcagccgtcggggacattttccggctgccttctccaccaaggctcctcccacattcgtttgccttatagcttcgtctttcgatgcccctgcgcgagcaacccaccctcggggggtttccgtcgtcgccaggggcgccaccgcaatggccagttcctcgccccctaagaatggagagtacatagtgggtgattttatgactaaaagagagcatttgcatgttgtaaaatctacaactactgttgatgaagcacttgagattctggtggagaaaagaattactggttttcctgtgattgatgatgactggaaactggttgggctggtttcagattatgatttgttggcgctggattccatttcaggaagtagccaaagtgatacaagcttcttcccagaagttgatagcagttggaaaacatttaatgagatacagaagttgcttagcaaaaccaatgggaaagtgattgctgatgtgatgacaccggctcctcttgttgttcgcgagaccaccaacctttggagatgctgctag

SEQ ID NO: 162 - protein, 193 aa, Saruma henryi
MDSVLLADPLSLSSYSLSRRGHFPAAFSTKAPPTFVCLIASSFDAPARATHPRGVSVVARGATAMASSSPPKNGEYIVGDFMTKREHLHVVKSTTTVDEALEILVEKRITGFPVIDDDWKLVGLVSDYDLLALDSISGSSQSDTSFFPEVDSSWKTFNEIQKLLSKTNGKVIADVMTPAPLVVRETTNLWRCC

SEQ ID NO: 163 - DNA, 711 bp, Solanum lycopersicum
atggcatctatctcgccgtcgggagtctccctccaccgcagctccgccgctttccaccaccagctgccttgtctgctcttatctctgccatgccacaaagttgctactttcgctaaatgtttcctctccgtacgcctttggaattcgcgcaaccatttttccgttaccgccagcaacactttgacggccaattcagtagagccaagaaatggtgtatatacagtaggtgatttcatgacaagaaaagatgatctacatgtggtaaaaccatcaacatccgtagatgaagccttggaaacgttggtagaacgcagaatcactgggttccctgtggttgatgatgactggaaattggttggtcttgtttctgattatgatctattggctctggattctgtatcaggtacaggaggagctgatgcaaacatgttccccgaagtgggcagcaactggaaaacattcaatgaggttcaaaagttgataagtaagaccaaggggaaagtggttggtgatttgatgacgcctgctccactagtagttagggagtccaccaatctagaggatgcagcaagacttctgctcaaaacaaaataccgccggcttcctgttgtagatagtgatggaaagctggtgggaataataacaaggggaaatgttgtgagagctgcccttcatattaaacggatcatggaaatggaaggccaacagtaa

SEQ ID NO: 164 - protein, 236 aa, Solanum lycopersicum
MASISPSGVSLHRSSAAFHHQLPCLLLSLPCHKVATFAKCFLSVRLWNSRNHFSVTASNTLTANSVEPRNGVYTVGDFMTRKDDLHVVKPSTSVDEALETLVERRITGFPVVDDDWKLVGLVSDYDLLALDSVSGTGGADANMFPEVGSNWKTFNEVQKLISKTKGKVVGDLMTPAPLVVRESTNLEDAARLLLKTKYRRLPVVDSDGKLVGIITRGNVVRAALHIKRIMEMEGQQ

SEQ ID NO: 165 - DNA, 729 bp, Solanum lycopersicum
atggagtccgttctcaatttcaactcaatttctccgatttgcgtacttaactatcgcctttttccgaccacgctctcttgctcgcctcgtccactttcaggagatccagccgttgctacatctcgccgatgtttatctcaacggaaactttctcgatctctccctccggcgtctcttccttcaacctccgctaatgccgctgcttctacttcaaattctcagtctccaagcgatggacattactcggttggtgactttatgactaggaaagaagatttacatgtagtaaaaactacaactaaagttggtgaagcccttgagatgcttgtggaaaaaagagttactgggcttcctgtagttgatgatgactggaaattggttggcgttgtttctgattatgacctactggcactcgactctatatcaggagctggccaagctgacacaaatctgtttcctgatgttgatagtacttggaagacattcaatgaggttcaaaagctactgagcaaaactaatgggaaagttgttggtgatgtcatgacgccgagtccattgtccgtctgtgaaaacaccaaccttgaagatgcttcgaggttgttgctccaaacgaaataccgtcggctaccagttgtagatgttgatggtaaactggttgggattatcacaaggggcaatgttgtcagagctgctcttcaaataaaacgcaccactgacaataccaactga

SEQ ID NO: 166 - protein, 242 aa, Solanum lycopersicum
MESVLNFNSISPICVLNYRLFPTTLSCSPRPLSGDPAVATSRRCLSQRKLSRSLPPASLPSTSANAAASTSNSQSPSDGHYSVGDFMTRKEDLHVVKTTTKVGEALEMLVEKRVTGLPVVDDDWKLVGVVSDYDLLALDSISGAGQADTNLFPDVDSTWKTFNEVQKLLSKTNGKVVGDVMTPSPLSVCENTNLEDASRLLLQTKYRRLPVVDVDGKLVGIITRGNVVRAALQIKRTTDNTN

SEQ ID NO: 167 - DNA, 705 bp, Solanum lycopersicum
atggcatctatatcaccctctggaagctgtctccaccgcacacccgccgcattccaccgtcagctgccttgcttgctcttatctctacccggccacatacttgctgcttccactaaattttaccttcctctacgtctttcggactctcgagatacctttcgccttgcttcagccaacactttgacggccaattctgtaccgcccagaaatggtgtgtatacggttggtgatttcatgaccaggaaagaggagttacatgtggtaaagcccacaacatccgtagatgaagcattggaagctctagtggaacacaggatcactggtttccctgtgattgatgataactggaaactagttggtcttgtttctgactatgatctattagcgctcgactctgtatcaggtacaggaacagctgatgcaggcatatttcctgaagtagacagcaactggaaaacattcaatgaggttcaaaagttgcttggcaagaccaaagggaaagtggttggtgatctgatgacacctgctcctttagtagttcgtgaatctaccaatcttgaagatgcagcaagacttctactcaaaacaaaatatcgtcggcttcctgtggtagatggtaagggtaagctggtgggaataataacaagaggaaacgttgtaagggccgcccttcaaataaagcgggctacagaaatggaagattga

SEQ ID NO: 168 - protein, 234 aa, Solanum lycopersicum
MASISPSGSCLHRTPAAFHRQLPCLLLSLPGHILAASTKFYLPLRLSDSRDTFRLASANTLTANSVPPRNGVYTVGDFMTRKEELHVVKPTTSVDEALEALVEHRITGFPVIDDNWKLVGLVSDYDLLALDSVSGTGTADAGIFPEVDSNWKTFNEVQKLLGKTKGKVVGDLMTPAPLVVRESTNLEDAARLLLKTKYRRLPVVDGKGKLVGIITRGNVVRAALQIKRATEMED

SEQ ID NO: 169 - DNA, 540 bp, Saccharum officinarum
atggacgccacgctactcctcctctccgccgactgcacggccgccgccagcgggcggctgcggcctcgactgcctgcgggcccacatgtggcttcccctggtccctccgcgcggccaaggacctccatccgcgcctcagctgcgtccgcggccctcgccgtccgtggcctgccgcatcatgcttccgtggccgggcaaagcactggaagttatacggttggtgatgttatgaccaaaagggaagacctgcatgttgtgaaaccaacaacttcagttgatgaagctcttgagatgctggtgaagcataggatcactggctttcctgttattgatgacgactggaatttggttggtgttgtctcagattatgatttattggcactggattcaatatcaggagctggaccggctgaagcagacatatttcctgaggtggatagcacttggaagacatttcgtgagatacaaaggcttttgagcaaaaccaaagggaaggttattggggatgttatgaccctcagcacctcttgtggggcgtga

SEQ ID NO: 170 - protein, 179 aa, Saccharum officinarum
MDATLLLLSADCTAAASGRLRPRLPAGPHVASPGPSARPRTSIRASAASAALAVRGLPHHASVAGQSTGSYTVGDVMTKREDLHVVKPTTSVDEALEMLVKHRITGFPVIDDDWNLVGVVSDYDLLALDSISGAGPAEADIFPEVDSTWKTFREIQRLLSKTKGKVIGDVMTLSTSCGA

SEQ ID NO: 171 - DNA, 711 bp, Solanum tuberosum
atggcatctttctcgccgtcgggactctccctccgccgcagctccgccgccttccaccaccagctcccttgtctgctcttatctctgccatgccacaaagttgctactttcgctaaatgtttcctctccgtacgcctttggaattcgcgcaagcatttttccgttaccgctagcaacactttgatggccaattctatagagccaagaaatggtgtatatacagtaggtgatttcatgacaagaaaagatgaactacatgtggtaaaaccatcaacatctgtagatgaagccttggaaattttggtagaacgcagaatcactggtttccctgtggttgatgatgactggaaattggttggtcttgtttctgattatgatctattggctctggactctgtatcaggtacaggaggacctgatgcaaacatgttccccgaagtgggcagcaactggaaaacattcaatgaggttcaaaagttgataagtaagaccaaggggaaagtggttggtgatttgatgacacctgctccactagtagttagggagtctaccaatctcgaggatgcagcaagacttctgctcaaaacaaaatatcgccggcttcctgttgtagatagtgacggaaagctggtgggaataataacaaggggaaatgttgtgagagctgcccttcatataaaacggatcatggaaatggaaggccaacagtaa

SEQ ID NO: 172 - protein, 236 aa, Solanum tuberosum
MASFSPSGLSLRRSSAAFHHQLPCLLLSLPCHKVATFAKCFLSVRLWNSRKHFSVTASNTLMANSIEPRNGVYTVGDFMTRKDELHVVKPSTSVDEALEILVERRITGFPVVDDDWKLVGLVSDYDLLALDSVSGTGGPDANMFPEVGSNWKTFNEVQKLISKTKGKVVGDLMTPAPLVVRESTNLEDAARLLLKTKYRRLPVVDSDGKLVGIITRGNVVRAALHIKRIMEMEGQQ

SEQ ID NO: 173 - DNA, 705 bp, Solanum tuberosum
atggcatctatatcaccgtctggaatctgtctccaccgcacatccgccgcattccaccgtcagctgtcttgcttgctcttatctctatccggccacaaacttgctgcttccactaaattttaccttcctctacgtttttcgtactctcgagatacctttcgccttgcttcagtcaacactttgacggccaattctgtaccgcccagaaatggtgtgtatacggtaggtgatttcatgaccaggaaagaggagttacatgtggtaaagcccacaacatccgtagatgaagcattggaagctctagtggaacacaggatcactggtttccctgtgattgatgataactggaaactagttggtcttgtttctgactatgatctattagcactcgactctgtatcaggtacaggaacagctgatgcaggcatatttcctgaagtagacagcaactggaaaacattcaatgaggttcaaaaattgcttggcaagaccaaagggaaagtggttggtgatctgatgacacctgctcctttagtagttcgtgaatctaccaatcttgaggatgcagcaagacttttactcaaaacaaaatatcgtcggcttcctgtggtagatggtaagggcaagctggtgggaataataacaagaggaaacgttgtaagggccgcccttcaaataaagcgggctacagaaatggaagattga

SEQ ID NO: 174 - protein, 234 aa, Solanum tuberosum
MASISPSGICLHRTSAAFHRQLSCLLLSLSGHKLAASTKFYLPLRFSYSRDTFRLASVNTLTANSVPPRNGVYTVGDFMTRKEELHVVKPTTSVDEALEALVEHRITGFPVIDDNWKLVGLVSDYDLLALDSVSGTGTADAGIFPEVDSNWKTFNEVQKLLGKTKGKVVGDLMTPAPLVVRESTNLEDAARLLLKTKYRRLPVVDGKGKLVGIITRGNVVRAALQIKRATEMED

SEQ ID NO: 175 - DNA, 636 bp, Solanum tuberosum
atggagtccgttctcaatttcaactcaatttctccgttttgcgtacttaactatcgcctttttccgaccacgttctcttgctcggcccgtccactttcaggagacccatccgttgctaaatctcgccgatgtttatctcaacagaaactttctcgatctcttcctccggcgtctcttccttcaacctccgctaatgccgctgcttctacttcaaattctcagtctccaagcgatggacattactcagttggtgactttatgactaggaaagaagatttacatgtagtaaaaactacaactaaagttggtgaagcccttgagatgcttgtggaaaaaagagttactgggcttcctgtagttgatgatgactggaaattggttggcgttgtttctgattatgacctactggctctcgactctatatcaggagctggccaagctgacacaaatctgtttcctgatgttgatagtacttggaagacattcaatgaggttcaaaagctactgagcaaaactaatggaaaagttgttggtgatgtcatgacaccgagtccattgtccgtctgtgaaaacccaaccttgaagatgctgcgaggttattgctccaaacgaaataccgtcgactaccagttgtag

SEQ ID NO: 176 - protein, 211 aa, Solanum tuberosum
MESVLNFNSISPFCVLNYRLFPTTFSCSARPLSGDPSVAKSRRCLSQQKLSRSLPPASLPSTSANAAASTSNSQSPSDGHYSVGDFMTRKEDLHVVKTTTKVGEALEMLVEKRVTGLPVVDDDWKLVGVVSDYDLLALDSISGAGQADTNLFPDVDSTWKTFNEVQKLLSKTNGKVVGDVMTPSPLSVCENPTLKMLRGYCSKRNTVDYQL

SEQ ID NO: 177 - DNA, 711 bp, Solanum tuberosum
atggcatctatctcgccgtcgggactctccctccgccgcagctccgccgctttccaccaccagcttccttgtctgctcttatctctgccattccacaaagttgctactttcgctaaatgtttcctctccgtacgcctttggaattcgcgcaagcatttttccgttaccgccagcaacactttgacggccaattctatagagccaagaaatggtgtatatacagtaggtgatttcatgacaagaaaagatgaactacatgtggtaaaaccatcaacatctgtagatgaagccttggaaattttggtagaacgcagaatcactggtttccctgtggttgatgatgactggaaattggttggtcttgtttctgattatgatctattggctctggactctgtatcaggtacaggaggagctgatgcaaacatgttccccgaagtgggcagcaactggaaaacattcaatgaggttcaaaagttgataagtaagaccaaggggaaagtggttggtgatttgatgacacctgctccactagtagttagggagtctaccaatctcgaggatgcagcaagacttctgctcaaaacaaaatatcgccggcttcctgttgtagatagtgatggaaagctggtgggaataataacaaggggaaatgttgtgagagctgcccttcatataaaacggatcatggaaatggaaggccaacagtaa

SEQ ID NO: 178 - protein, 236 aa, Solanum tuberosum
MASISPSGLSLRRSSAAFHHQLPCLLLSLPFHKVATFAKCFLSVRLWNSRKHFSVTASNTLTANSIEPRNGVYTVGDFMTRKDELHVVKPSTSVDEALEILVERRITGFPVVDDDWKLVGLVSDYDLLALDSVSGTGGADANMFPEVGSNWKTFNEVQKLISKTKGKVVGDLMTPAPLVVRESTNLEDAARLLLKTKYRRLPVVDSDGKLVGIITRGNVVRAALHIKRIMEMEGQQ

SEQ ID NO: 179 - DNA, 693 bp, Triticum aestivum
atggccgccaggctgctgctcctctccttcgattgcccggccgtcgctggcgggcggcggtctcgtctgtctgcagtgccacggatgtcttccggtgcacccctcgtgcggcccccagcctcatccgtccgcgcgttcgcggtcaccgccgctagaggcaagctgccgcaccgcacctccgtggctgtggagggtggtggagtttacactgttggtgactttatgactaaaagggaacaactccatgttgtgaaaccatccacttcagtagatgaagctcttgagaggctggtggagcatcgaataactggctttcctgttaccgatgatcactggaatttggttggtgtggtctcagattatgatctgttagcactggactcgatatcaggaaatggacagactgaagctgacatatttcctgaggtggacagcacttggaagactttccatcacatacaaaagctcttaagcaaaaccaatgggaaagtagttagtgatgttatgacttctgcacctcttgtggtgcgtgaaactactaaccttgaagatgctgcaaggttacttcttgttactaaataccgcaggctgccagtagtcgacagttcgggcaaattggttggaatcatcacaagagggaacgtcgtcagagctgctcttgagtttaagaaaaatgttgaagggagtctttga

SEQ ID NO: 180 - protein, 230 aa, Triticum aestivum
MAARLLLLSFDCPAVAGGRRSRLSAVPRMSSGAPLVRPPASSVRAFAVTAARGKLPHRTSVAVEGGGVYTVGDFMTKREQLHVVKPSTSVDEALERLVEHRITGFPVTDDHWNLVGVVSDYDLLALDSISGNGQTEADIFPEVDSTWKTFHHIQKLLSKTNGKVVSDVMTSAPLVVRETTNLEDAARLLLVTKYRRLPVVDSSGKLVGIITRGNVVRAALEFKKNVEGSL

SEQ ID NO: 181 - DNA, 705 bp, Triticum aestivum
atggaggccgccgcgtcccctctgctcctctccgccgacgcgcccctcgccgccggccgccgcctcctcctcgtcccttctcggcccgcgcgcgccccacggcggggcgccgcgcccagcaggtgccggcgggcgtccgtccgcgcgtacgccgcggccgccgcgccagcgccggcctctggaaacggcctcgtcgggaataacaacggagtgtacactgttggagacttcatgacgaaaagggaggatctccatgtcgtcaaagcgtcaaccccggttgatgaagcgctcgagatgctggtgcagaacaggatctctggtttccctgttatcgatgacgactggaagttggttggcgttgtctcagattatgatctattagctttggactcaatggcaggatgtggactggctgatacaaattcaagtatgttccctgaagtagatagcacttggaagacatttcgcgagatccagagactcttgagcaaaaccagtggcaaagttatcggtgatgttatgactccctcacctcttgtggtgcgtgaaactactaacctcgacgctgctgcaaggttgctgcttgaaaccaaataccacagattgcctgttgttgatagcacgggaaatttggttgggatgatcacaagggggaatgtcgtcagagctgctctcaaaataaagaagaaagctgaaggtgcttaa

SEQ ID NO: 182 - protein, 234 aa, Triticum aestivum
MEAAASPLLLSADAPLAAGRRLLLVPSRPARAPRRGAAPSRCRRASVRAYAAAAAPAPASGNGLVGNNNGVYTVGDFMTKREDLHVVKASTPVDEALEMLVQNRISGFPVIDDDWKLVGVVSDYDLLALDSMAGCGLADTNSSMFPEVDSTWKTFREIQRLLSKTSGKVIGDVMTPSPLVVRETTNLDAAARLLLETKYHRLPVVDSTGNLVGMITRGNVVRAALKIKKKAEGA

SEQ ID NO: 183 - DNA, 726 bp, Theobroma cacao
atggactcaattctccacacagaatccctttctctcacgcgcctacgcgccgcttccacttccacctccaccgctaccattcaccacatgccttgccaactcatctttcgtccggtccaccgtctcctccttcccatatccgccgtcaccgccggctctggctctcgtagggcatccacttccgttgtcgctgctaacggcactctcaccgccaactccgtttcgccaagaggtggagtatatacggttggggattttatgacgaggaaagagaatttgcatgtggtgaagccaacaacaactgttgatgaagcattggaaactcttgttgaacacagaatcactggttttcctgtcattgatgatgattggaaattggttggacttgtttccgattatgacttgttagcattggactccatatctgggcgacggactgaaaatgacatgtttcctgaagttgacagcacttggaaaactttccacgagctacaaaagttactcagtaaaaccaatggccagctggttggtgatttaatgacaccagctccagtagttgtacgagaaacaactaacctcgaggatgctgctagattattgctcgagacaaaatatcgtcgacttccagttgttgatgttgagggtaagctggtcggtatcatcacaagaggaaatgttgtgagagctgcccttcaaataaagcgtgctattgaaggcgaagcataa

SEQ ID NO: 184 - protein, 241 aa, Theobroma cacao
MDSILHTESLSLTRLRAASTSTSTATIHHMPCQLIFRPVHRLLLPISAVTAGSGSRRASTSVVAANGTLTANSVSPRGGVYTVGDFMTRKENLHVVKPTTTVDEALETLVEHRITGFPVIDDDWKLVGLVSDYDLLALDSISGRRTENDMFPEVDSTWKTFHELQKLLSKTNGQLVGDLMTPAPVVVRETTNLEDAARLLLETKYRRLPVVDVEGKLVGIITRGNVVRAALQIKRAIEGEA

SEQ ID NO: 185 - DNA, 720 bp, Taraxacum officinale
atggactcgatcatcttaccggcggtgtctatatccggtgttgtttccgccgcacgagatcgtcgaataccgtctacaacctcacatgctagcgctttttaccaggggaaatttctctctactcgctcgttaccacggttctccgatcgcgatcataggcgtttgacagccgttcatgccgtcgctgctgatatgactaattccgcgcctattagagatgtaatatatacagttgctgattttatgacaaagaaagagaagttacttgtggtagaaacaacaactacagttgatcaggcattagagattcttgcggacaaaagaataacaggctttccggttgttgatgctgattggaatttggttggtgttgtttcagattacgacttgttagctcttgattcaatatcaggtgttaatcactgtgacacaagcttgtttcctgatgtcgatagttcttggacaacattcaatgagattcaaaaactacttggtaaaactgatggaaaagttgtgggagacttgatgacacctactccacttgtagttcatgataccacaaatcttgaagaagctgtaaggttgttgcttgaaacaaaataccgtaggcttccagtagttgatgataatgggaaactggttggacttattacaaggggagatgttgttagggctgcacttaagataaaagatgatataaagaaaatgcaatcagagtaa

SEQ ID NO: 186 - protein, 239 aa, Taraxacum officinale
MDSIILPAVSISGVVSAARDRRIPSTTSHASAFYQGKFLSTRSLPRFSDRDHRRLTAVHAVAADMTNSAPIRDVIYTVADFMTKKEKLLVVETTTTVDQALEILADKRITGFPVVDADWNLVGVVSDYDLLALDSISGVNHCDTSLFPDVDSSWTTFNEIQKLLGKTDGKVVGDLMTPTPLVVHDTTNLEEAVRLLLETKYRRLPVVDDNGKLVGLITRGDVVRAALKIKDDIKKMQSE

SEQ ID NO: 187 - DNA, 678 bp, Trifolium pratense
atggactcggtcactctccctttctctgcactctcttccgccactcaccgtccaattttcattccacgcgccactgtcggtttccgctgcttccacagctccgttcatcttccaactactcttcgtggttcccctcttttcgccgccaatacactcaccgctaattccgtgccgccaaaaaatggagtgtacactgtcggtgactttatgacaaagaaagatgagttacaagtagtgaagcccacaacaactgtggatgaagctttggaatctcttgttgaacacagaataaccggttttccggtgattgatgataactggaagctagttggcgttgtttcagattacgacttattagcactggactctatttcaggtcatgggcgaacagataacagcatgtttccagaagttgacagtacttggaagactttcaacgaggttcaaagactactgagcaagaccaacgggaaggtgattggtgaattaatgaccgctgcccctatggtcgttcgcgagaccaccaatctcgaggatgctgctagattgttgctggaaacaaaatttcgacgacttccagttgtagatgccgagggtagattggttgggattatcacaagaggaaatgttgtaagagctgcacttcaaatgaaacgagacaacgaaaagaaagcatga

SEQ ID NO: 188 - protein, 225 aa, Trifolium pratense
MDSVTLPFSALSSATHRPIFIPRATVGFRCFHSSVHLPTTLRGSPLFAANTLTANSVPPKNGVYTVGDFMTKKDELQVVKPTTTVDEALESLVEHRITGFPVIDDNWKLVGVVSDYDLLALDSISGHGRTDNSMFPEVDSTWKTFNEVQRLLSKTNGKVIGELMTAAPMVVRETTNLEDAARLLLETKFRRLPVVDAEGRLVGIITRGNVVRAALQMKRDNEKKA

SEQ ID NO: 189 - DNA, 684 bp, Zea mays
atggacattaggctgctggtatccgccgacgccaacctcgccgccgctctgtcgcgctcccgctcttccaagtccgcgttccagcgccaggttgtcccgagcagccgggcgtcgtcgtgcaggtccgtccgcgcgcgctccgccgcagccgccgcgccggctgcgggaggcatctccgggcatagcaattacacggttggtgacttcatgacaagaagggacaatctccatgttgtccaacctactacaccagttgaccaagccctggagctgctggtgcaacacaggatctctggcttccctgtggttgacgatgactggaacttggttggggttgtatcagattatgatctcctagctttggattcgatgtcaggaaatgaattggccgatacaagtacaaacatgtttcctgatgtggatagcacatggaagacattccccgagctacagaggatattaagcaaaactaatgggaaggtcattggtgatgtaatgccctcttcccctttagcggtgggtataaatactaatcttgatgctgctacaaggttgctacttgaaactaaataccggagactacctgtagttgatagcatggggaaattagttgggatgattacaaggggaaatgtcgtcagtgctgccctcaaaataaagaagaaaactgaagaaggtgcttga

SEQ ID NO: 190 - protein, 227 aa, Zea mays
MDIRLLVSADANLAAALSRSRSSKSAFQRQVVPSSRASSCRSVRARSAAAAAPAAGGISGHSNYTVGDFMTRRDNLHVVQPTTPVDQALELLVQHRISGFPVVDDDWNLVGVVSDYDLLALDSMSGNELADTSTNMFPDVDSTWKTFPELQRILSKTNGKVIGDVMPSSPLAVGINTNLDAATRLLLETKYRRLPVVDSMGKLVGMITRGNVVSAALKIKKKTEEGA

SEQ ID NO: 191 - DNA, 699 bp, Zea mays
atggacgccacgctcctcctcctccccgccaactgcacggccgccgccagcgggcggatgcggcctcgactgcctgcaggcccacatgtggcttcccctggtccctccgcgcggccaaggacctccatccgggcctcagccgtgtccgcagccctcgccgttcgtggcctcccgcaacacgcttccgtggccgggcaaagcactggaagttatagggttggtgatgttatgaccaaaagggaagagctccatgttgtgaaaccaacaacttcagttgatgacgcccttgagatgctggtgaagcataggatctctggctttcctgttattgatgatgactggaatttggttggcgttgtgtcagattatgatttattggcactggatacaatatcaggagctggaccggctgaagcagacatatttcctgaggtggatagcacttggaagacatttcatgagatacagaagcttttgagcaaaaccaacgggaaggttattgctgatgttatgaccccagcgcctctcgtggtgcgtgaaacaactaaccttgaagatgctgcaaggttactccttgtgactaagtaccgcaggcttccagtggtcgatagctcaggcaaactggttgggatcattacaagagggaacgtcgtccaagccgccctcgaaatcaagaaaaaggttgaagggacactctga

SEQ ID NO: 192 - protein, 232 aa, Zea mays
MDATLLLLPANCTAAASGRMRPRLPAGPHVASPGPSARPRTSIRASAVSAALAVRGLPQHASVAGQSTGSYRVGDVMTKREELHVVKPTTSVDDALEMLVKHRISGFPVIDDDWNLVGVVSDYDLLALDTISGAGPAEADIFPEVDSTWKTFHEIQKLLSKTNGKVIADVMTPAPLVVRETTNLEDAARLLLVTKYRRLPVVDSSGKLVGIITRGNVVQAALEIKKKVEGTL

SEQ ID NO: 193 - DNA, 684 bp, Zea mays
atggacattaggctgctggtatccgccgacgccaacctcgccgccgctctgtcgcgctcccgctcttccaagtccgcgttccagcgccaggttgtcccgggcagccgggcgtcgtcgtgcaggtccgtccgcgcgcgctccgccgcagccgccgcgccggccgcgggaggcatctccgggcatagcaattacacggttggtgacttcatgacaacaagggacaatctccatgttgtccaacctactacaccagttgaccaagccctggagctgctggtgcaacacaggatctctggcttccctgtggttgacgatgactggaacttggttggggttgtatcagattatgatctcctagctttggattcgatgtcaggaaatgaattggccgatacaagtacaaacatgtttcctgatgtggatagcacatggaagacattccacgagctacagaggatattaagcaaaactaatgggaaggtcattggtgatgtaatgacctcttcacctttagcggtgcgtataaatactaatcttgatgctgctacaaggttgctacttgaaactaaataccggagactacctgtagttgatagcatggggaaactagttgggatgattacaaggggaaatgtcgtcagtgctgccctcaaaataaagaagaaaactgaagaaggtgcttga

SEQ ID NO: 194 - protein, 227 aa, Zea mays
MDIRLLVSADANLAAALSRSRSSKSAFQRQVVPGSRASSCRSVRARSAAAAAPAAGGISGHSNYTVGDFMTTRDNLHVVQPTTPVDQALELLVQHRISGFPVVDDDWNLVGVVSDYDLLALDSMSGNELADTSTNMFPDVDSTWKTFHELQRILSKTNGKVIGDVMTSSPLAVRINTNLDAATRLLLETKYRRLPVVDSMGKLVGMITRGNVVSAALKIKKKTEEGA

SEQ ID NO: 195 - DNA, 591 bp, Zea mays
atggacattaggctgctggtatccgccgacgccaacctcgccgccgctctgtcgcgctcccgctcttccaagtccgcgttccagcgccaggttgtcccgagcagccgggcgtcgtcgtgcaggtccgtccgcgcgcgctccgccgcagccgccgcgccggctgcgggaggcatctccgggcatagcaattacacggttggtgacttcatgacaagaagggacaatctccatgttgtccaacctactacaccagttgaccaagccctggagctgctggtgcaacacaggatctctggcttccctgtggttgacgatgactggaacttggttggggttgtatcagattatgatctcctagctttggattcgatgtcaggaaatgaattggccgatacaagtacaaacatgtttcctgatgtggatagcacatggaagacattccacgagctacagaggatattaagcaaaactaatgggaaggtcattggtgatgtaatgacctcttcacctttagcggttgggatgattacaaggggaaatgtcgtcagtgctgccctcaaaataaagaagaaaactgaagaaggtgcttga

SEQ ID NO: 196 - protein, 196 aa, Zea mays
MDIRLLVSADANLAAALSRSRSSKSAFQRQVVPSSRASSCRSVRARSAAAAAPAAGGISGHSNYTVGDFMTRRDNLHVVQPTTPVDQALELLVQHRISGFPVVDDDWNLVGVVSDYDLLALDSMSGNELADTSTNMFPDVDSTWKTFHELQRILSKTNGKVIGDVMTSSPLAVGMITRGNVVSAALKIKKKTEEGA

SEQ ID NO: 197 - DNA, 684 bp, Zea mays
atggacattaggctgctggtatccgccgacgccaacctcgccgccgctctgtcgcgctcccgctcttccaagtccgcgttccagcgccaggttgtcccgagcagccgggcgtcgtcgtgcaggtccgtccgcgcgcgctccgccgcagccgccgcgccggctgcgggaggcatctccgggcatagcaattacacggttggtgacttcatgacaagaagggacaatctccatgttgtccaacctactacaccagttgaccaagccctggagctgctggtgcaacacaggatctctggcttccctgtggttgacgatgactggaacttggttggggttgtatcagattatgatctcctagctttggattcgatgtcaggaaatgaattggccgatacaagtacaaacatgtttcctgatgtggatagcacatggaagacattccacgagctacagaggatattaagcaaaactaatgggaaggtcattggtgatgtaatgacctcttcacctttagcggtgcgtataaatactaatcttgatgctgctacaaggttgctacttgaaactaaataccggagactacctgtagttgatagcatggggaaattagttgggatgattacaaggggaaatgtcgtcagtgctgccctcaaaataaagaagaaaactgaagaaggtgcttga

SEQ ID NO: 198 - protein, 227 aa, Zea mays
MDIRLLVSADANLAAALSRSRSSKSAFQRQVVPSSRASSCRSVRARSAAAAAPAAGGISGHSNYTVGDFMTRRDNLHVVQPTTPVDQALELLVQHRISGFPVVDDDWNLVGVVSDYDLLALDSMSGNELADTSTNMFPDVDSTWKTFHELQRILSKTNGKVIGDVMTSSPLAVRINTNLDAATRLLLETKYRRLPVVDSMGKLVGMITRGNVVSAALKIKKKTEEGA

SEQ ID NO: 199 - DNA, 699 bp, Zea mays
atggacgccacgctcctcctcctccccgccaactgcacggccgccgccagcgggcggatgcggcctcgactgcctgcaggcccacatgtggcttcccctggtccctccgcgcggccaaggacctccatccgggcctcagccgtgtccgcagccctcgccgttcgtggcctcccgcaacacgcttccgtggccgggcaaagcactggaagttatagggttggtgatgttatgaccaaaagggaagagctccatgttgtgaaaccaacaacttcagttgatgacgcccttgagatgctggtgaagcataggatctctggctttcctgttattgatgatgactggaatttggttggcgttgtgtcagattatgatttattggcactggatacaatatcaggagctggaccggctgaagcagacatatttcctgaggtggatagcacttcgaagacatttcatgagatacagaagcttttgagcaaaaccaacgggaaggttattgctgatgttatgaccccagcgcctctcgtggtgcgtgaaacaactaaccttgaagatgctgcaaggttactccttgtgactaagtaccgcaggcttccagtggtcgatagctcaggcaaactggttgggatcattacaagagggaacgtcgtccaagccgccctcgaaatcaagaaaaaggttgaagggacactctga

SEQ ID NO: 200 - protein, 232 aa, Zea mays
MDATLLLLPANCTAAASGRMRPRLPAGPHVASPGPSARPRTSIRASAVSAALAVRGLPQHASVAGQSTGSYRVGDVMTKREELHVVKPTTSVDDALEMLVKHRISGFPVIDDDWNLVGVVSDYDLLALDTISGAGPAEADIFPEVDSTSKTFHEIQKLLSKTNGKVIADVMTPAPLVVRETTNLEDAARLLLVTKYRRLPVVDSSGKLVGIITRGNVVQAALEIKKKVEGTL

SEQ ID NO: 201 - DNA, 2194 bp, Oryza sativa
aatccgaaaagtttctgcaccgttttcaccccctaactaacaatatagggaacgtgtgctaaatataaaatgagaccttatatatgtagcgctgataactagaactatgcaagaaaaactcatccacctactttagtggcaatcgggctaaataaaaaagagtcgctacactagtttcgttttccttagtaattaagtgggaaaatgaaatcattattgcttagaatatacgttcacatctctgtcatgaagttaaattattcgaggtagccataattgtcatcaaactcttcttgaataaaaaaatctttctagctgaactcaatgggtaaagagagagattttttttaaaaaaatagaatgaagatattctgaacgtattggcaaagatttaaacatataattatataattttatagtttgtgcattcgtcatatcgcacatcattaaggacatgtcttactccatcccaatttttatttagtaattaaagacaattgacttatttttattatttatcttttttcgattagatgcaaggtacttacgcacacactttgtgctcatgtgcatgtgtgagtgcacctcctcaatacacgttcaactagcaacacatctctaatatcactcgcctatttaatacatttaggtagcaatatctgaattcaagcactccaccatcaccagaccacttttaataatatctaaaatacaaaaaataattttacagaatagcatgaaaagtatgaaacgaactatttaggtttttcacatacaaaaaaaaaaagaattttgctcgtgcgcgagcgccaatctcccatattgggcacacaggcaacaacagagtggctgcccacagaacaacccacaaaaaacgatgatctaacggaggacagcaagtccgcaacaaccttttaacagcaggctttgcggccaggagagaggaggagaggcaaagaaaaccaagcatcctccttctcccatctataaattcctccccccttttcccctctctatataggaggcatccaagccaagaagagggagagcaccaaggacacgcgactagcagaagccgagcgaccgccttctcgatccatatcttccggtcgagttcttggtcgatctcttccctcctccacctcctcctcacagggtatgtgcctcccttcggttgttcttggatttattgttctaggttgtgtagtacgggcgttgatgttaggaaaggggatctgtatctgtgatgattcctgttcttggatttgggatagaggggttcttgatgttgcatgttatcggttcggtttgattagtagtatggttttcaatcgtctggagagctctatggaaatgaaatggtttagggatcggaatcttgcgattttgtgagtaccttttgtttgaggtaaaatcagagcaccggtgattttgcttggtgtaataaagtacggttgtttggtcctcgattctggtagtgatgcttctcgatttgacgaagctatcctttgtttattccctattgaacaaaaataatccaactttgaagacggtcccgttgatgagattgaatgattgattcttaagcctgtccaaaatttcgcagctggcttgtttagatacagtagtccccatcacgaaattcatggaaacagttataatcctcaggaacaggggattccctgttcttccgatttgctttagtcccagaattttttttcccaaatatcttaaaaagtcactttctggttcagttcaatgaattgattgctacaaataatgcttttatagcgttatcctagctgtagttcagttaataggtaatacccctatagtttagtcaggagaagaacttatccgatttctgatctccatttttaattatatgaaatgaactgtagcataagcagtattcatttggattattttttttattagctctcaccccttcattattctgagctgaaagtctggcatgaactgtcctcaattttgttttcaaattcacatcgattatctatgcattatcctcttgtatctacctgtagaagtttctttttggttattccttgactgcttgattacagaaagaaatttatgaagctgtaatcgggatagttatactgcttgttcttatgattcatttcctttgtgcagttcttggtgtagcttgccactttcaccagcaaagttc

SEQ ID NO: 202 - DNA, 3536 bp, Artificial sequence
  pGOS2::LEJ1::t-zein sequence
aatccgaaaagtttctgcaccgttttcaccccctaactaacaatatagggaacgtgtgctaaatataaaatgagaccttatatatgtagcgctgataactagaactatgcaagaaaaactcatccacctactttagtggcaatcgggctaaataaaaaagagtcgctacactagtttcgttttccttagtaattaagtgggaaaatgaaatcattattgcttagaatatacgttcacatctctgtcatgaagttaaattattcgaggtagccataattgtcatcaaactcttcttgaataaaaaaatctttctagctgaactcaatgggtaaagagagagattttttttaaaaaaatagaatgaagatattctgaacgtattggcaaagatttaaacatataattatataattttatagtttgtgcattcgtcatatcgcacatcattaaggacatgtcttactccatcccaatttttatttagtaattaaagacaattgacttatttttattatttatcttttttcgattagatgcaaggtacttacgcacacactttgtgctcatgtgcatgtgtgagtgcacctcctcaatacacgttcaactagcaacacatctctaatatcactcgcctatttaatacatttaggtagcaatatctgaattcaagcactccaccatcaccagaccacttttaataatatctaaaatacaaaaaataattttacagaatagcatgaaaagtatgaaacgaactatttaggtttttcacatacaaaaaaaaaaagaattttgctcgtgcgcgagcgccaatctcccatattgggcacacaggcaacaacagagtggctgcccacagaacaacccacaaaaaacgatgatctaacggaggacagcaagtccgcaacaaccttttaacagcaggctttgcggccaggagagaggaggagaggcaaagaaaaccaagcatcctcctcctcccatctataaattcctccccccttttcccctctctatataggaggcatccaagccaagaagagggagagcaccaaggacacgcgactagcagaagccgagcgaccgccttcttcgatccatatcttccggtcgagttcttggtcgatctcttccctcctccacctcctcctcacagggtatgtgcccttcggttgttcttggatttattgttctaggttgtgtagtacgggcgttgatgttaggaaaggggatctgtatctgtgatgattcctgttcttggatttgggatagaggggttcttgatgttgcatgttatcggttcggtttgattagtagtatggttttcaatcgtctggagagctctatggaaatgaaatggtttagggtacggaatcttgcgattttgtgagtaccttttgtttgaggtaaaatcagagcaccggtgattttgcttggtgtaataaaagtacggttgtttggtcctcgattctggtagtgatgcttctcgatttgacgaagctatcctttgtttattccctattgaacaaaaataatccaactttgaagacggtcccgttgatgagattgaatgattgattcttaagcctgtccaaaatttcgcagctggcttgtttagatacagtagtccccatcacgaaattcatggaaacagttataatcctcaggaacaggggattccctgttcttccgatttgctttagtcccagaattttttttcccaaatatcttaaaaagtcactttctggttcagttcaatgaattgattgctacaaataatgcttttatagcgttatcctagctgtagttcagttaataggtaatacccctatagtttagtcaggagaagaacttatccgatttctgatctccatttttaattatatgaaatgaactgtagcataagcagtattcatttggattattttttttattagctctcaccccttcattattctgagctgaaagtctggcatgaactgtcctcaattttgttttcaaattcacatcgattatctatgcattatcctcttgtatctacctgtagaagtttctttttggttattccttgactgcttgattacagaaagaaatttatgaagctgtaatcgggatagttatactgcttgttcttatgattcatttcctttgtgcagttcttggtgtagcttgccactttcaccagcaaagttcatttaaatcaactagggatatcacaagtttgtacaaaaaagcaggcttaaacaatgggttcaatctctttatccaattctatgcccataactcgacttccactacttacatcactctatcatcaaagcttccttccgatttcttcttcatctttctctcttcttcctctctctaatcgtcgtcgctcctccactttttcaccgtcaatcaccgtctctgccttcttcgctgctcctgccagcgttaataataataactctgttccggcaaaaaatggaggttacacagttggggatttcatgactccgagacagaatttgcacgttgttaagccctctacgtcggtcgatgatgcgttggaacttctggttgagaagaaagtcacgggattgcctgtaattgacgataattggacactggttggtgttgtttctgattacgatttgcttgcattggactccatctctggtcgcagtcaaaatgatacaaacttgttccctgatgtcgacagtacctggaaaacgtttaacgaactacagaaactgatcagtaagacatatggaaaagttgttggagacttgatgacaccgtctcctctcgttgtccgtgattctaccaatttagaagatgcagccaggttgcttctggaaacaaagttccgaagattacccgttgttgatgctgatggaaaactgattgggatccttacaaggggaaacgttgtaagggctgcgctgcagatcaaacgggaaaccgagaactctacatagctaggaagcagcagtgatggagcagatctgaatacccagctttcttgtacaaagtggtgatatcacaagcccgggcggtcttctagggataacagggtaattatatccctctagatcacaagcccgggcggtcttctacgatgattgagtaataatgtgtcacgcatcaccatgggtggcagtgtcagtgtgagcaatgacctgaatgaacaattgaaatgaaaagaaaaaaagtactccatctgttccaaattaaaattcattttaaccttttaataggtttatacaataattgatatatgttttctgtatatgtctaatttgttatcatccgggcggtcttctagggataacagggtaattatatccctctagacaacacacaacaaataagagaaaaaacaaataatattaatttgagaatgaacaaaaggaccatatcattcattaactcttctccatccatttccatttcacagttcgatagcgaaaaccgaataaaaaacacagtaaattacaagcacaacaaatggtacaagaaaaacagttttcccaatgccataatactcgaac

SEQ ID NO: 203 - DNA, 56 bp, Artificial sequence
  primer: prm14149
ggggacaagtttgtacaaaaaagcaggcttaaacaatgggttcaatctctttatcc

SEQ ID NO: 204 - DNA, 50 bp, Artificial sequence
  primer: prm14150
ggggaccactttgtacaagaaagctgggtattcagatctgctccatcact

SEQ ID NO: 205 - protein, 50 aa, Artificial sequence
  motif 1
  VARIANT (6)..(6): / replace = "Ser"
  VARIANT (8)..(8): / replace = "Ser"
  VARIANT (11)..(11): / replace = "Asp"
  VARIANT (15)..(15): / replace = "Leu" / replace = "Ile"
  VARIANT (19)..(19): / replace = "Lys" / replace = "Asn"
  VARIANT (20)..(20): / replace = "Arg"
  VARIANT (21)..(21): / replace = "Val"
  VARIANT (24)..(24): / replace = "Leu"
  VARIANT (27)..(27): / replace = "Val"
  VARIANT (30)..(30): / replace = "Asn"
  VARIANT (32)..(32): / replace = "Thr" / replace = "Asn"
  VARIANT (36)..(36): / replace = "Leu"
HVVKPTTTVDEALEALVEHKITGFPVIDDDWKLVGVVSDYDLLALDSISG

SEQ ID NO: 206 - protein, 41 aa, Artificial sequence
  motif 2
  VARIANT (2)..(2): / replace = "Ser"
  VARIANT (3)..(3): / replace = "Leu"
  VARIANT (6)..(6): / replace = "Asp"
  VARIANT (17)..(17): / replace = "Ile" / replace = "Leu"
  VARIANT (21)..(21): / replace = "Ile"
  VARIANT (25)..(25): / replace = "Tyr"
  VARIANT (29)..(29): / replace = "Ile"
  VARIANT (32)..(32): / replace = "Val"
  VARIANT (36)..(36): / replace = "Ser"
TNMFPEVDSTWKTFNEVQKLLSKTNGKVVGDLMTPAPLVVR

SEQ ID NO: 207 - protein, 35 aa, Artificial sequence
  motif 3
  VARIANT (14)..(14): / replace = "Phe"
  VARIANT (22)..(22): / replace = "Ala"
  VARIANT (23)..(23): / replace = "Glu"
  VARIANT (27)..(27): / replace = "Ile"
  VARIANT (30)..(30): / replace = "Leu"
NLEDAARLLLETKYRRLPVVDSDGKLVGIITRGNV

SEQ ID NO: 208 - protein, 50 aa, Artificial sequence
  motif 4
  VARIANT (2)..(2): / replace = "Gly"
  VARIANT (3)..(3): / replace = "Arg"
  VARIANT (5)..(5): / replace = "Glu"
  VARIANT (15)..(15): / replace = "Pro"
  VARIANT (16)..(16): / replace = "Lys"
  VARIANT (18)..(18): / replace = "Asn"
  VARIANT (49)..(49): / replace = "Asn"
PAKNGGYTVGDFMTGRQHLHVVKPSTSVDDALELLVEKKVTGLPVIDDDW

SEQ ID NO: 209 - protein, 50 aa, Artificial sequence
  motif 5
  VARIANT (1)..(1): / replace = "Arg"
  VARIANT (2)..(2): / replace = "Ser"
  VARIANT (6)..(6): / replace = "Glu"
  VARIANT (9)..(9): / replace = "Met"
  VARIANT (12)..(12): / replace = "Asp"
  VARIANT (16)..(16): / replace = "Ser"
  VARIANT (31)..(31): / replace = "Tyr"
  VARIANT (33)..(33): / replace = "Gln"
  VARIANT (48)..(48): / replace = "Asp"
GRSQNDTNLFPNVDSTWKTFNELQKLISKTHGKVVGDLMTPSPLVVRGST

SEQ ID NO: 210 - protein, 50 aa, Artificial sequence
  motif 6
  VARIANT (22)..(22): / replace = "Ala"
  VARIANT (48)..(48): / replace = "Lys"
  VARIANT (50)..(50): / replace = "Ala"
NLEDAARLLLETKFRRLPVVDSDGKLIGILTRGNVVRAALQIKRETENST

SEQ ID NO: 211 - DNA, 633 bp, Synechocystis sp.
atggccgggggcatagtggcggtgcccctcctcggtttttccctgttagctgtggccctgattatcgagcgtgcctatttttggagtcagatccagttacggcaaaatcggttggtaaatgatgtgctcaagctttatcgcagtaatcccccaggggcgatcgccaagctgaaacaaaatgcggatttacccatggcacgaatttttctcgaagccctgtgtttggagggggccacaccaacggagtttcgcctggccctggaaagcgctacccaagcagaattaccgcttttaaaacgatttaacaccctatttcagaccattatcaccgtttcccctctcctgggcttactggggacaattttgggactaatgcgttccttttcttccatgagtttaggcagtaccaccgccgccaatgcctcgggggtcaccggggggatcagtgaagcattggtgtccaccgtgatgggcttggtagttgccattgccactctcctctttgccaacgtgttccgttccctctatctgcgccaattcgccctcatacaggagcaaacggggcaaatcgaattggtatatcgccgtttccatgaccaaccggaggaaaaagagtatgcgacttcccgatga

SEQ ID NO: 212 - protein, 210 aa, Synechocystis sp.
MAGGIVAVPLLGFSLLAVALIIERAYFWSQIQLRQNRLVNDVLKLYRSNPPGAIAKLKQNADLPMARIFLEALCLEGATPTEFRLALESATQAELPLLKRFNTLFQTIITVSPLLGLLGTILGLMRSFSSMSLGSTTAANASGVTGGISEALVSTVMGLVVAIATLLFANVFRSLYLRQFALIQEQTGQIELVYRRFHDQPEEKEYATSR

SEQ ID NO: 213 - DNA, 708 bp, Acaryochloris marina
gtgtccacaatctatactttcctggccaagggtggcccagtcatgattcccattgcgggattatctgtactgactttagcgtgtgccttcgaacgaaccattttctggatccgtttgatcagtcaagaacatcgtattgttcatgatgtcttggatgcagctcgctgcagcttagaggaagcggaagccattgctcagcatgctcggtttttgcccattggccgattcctgttagcaccgctgcgcttgcatcaaccctcgccagagaccttccgcttagccctggaagcggcggcagataaagaatttgtcagaatgcgcaagggcgataagctactggaaacaactgtggcggttgcccccctgatgggtcttttgggaacagtaactggcctgatcaatacttttaataatctcaacattggcagtgggggcacctctgaacaggcaaccaaagcggctgcagggattggtgaagccctcttaaccacagcagcggggatggtcgttgccattttggccctgattgttctacgcatttttgtgattttgcaggcccgccaagtcgatacattctccgaagtgggaagcgaaatggaattgatttatcgacaggtctggtacgaacccaaccaggtcaaccgtcctgcctatttgccaaaaggcagttcagttgaacctacccaggttactttagaaactctgtaa

SEQ ID NO: 214 - protein, 235 aa, Acaryochloris marina
VSTIYTFLAKGGPVMIPIAGLSVLTLACAFERTIFWIRLISQEHRIVHDVLDAARCSLEEAEAIAQHARFLPIGRFLLAPLRLHQPSPETFRLALEAAADKEFVRMRKGDKLLETTVAVAPLMGLLGTVTGLINTFNNLNIGSGGTSEQATKAAAGIGEALLTTAAGMVVAILALIVLRIFVILQARQVDTFSEVGSEMELIYRQVWYEPNQVNRPAYLPKGSSVEPTQVTLETL

SEQ ID NO: 215 - DNA, 669 bp, Acaryochloris marina
gtgaatattatcgagctatttgagaagggagggcccacaatatggccattactcggactctccattttagcgattggaactgtttttgagcggttatggttctggagcaatcttctcaaaggagaacgaaaaacagcgaagcaaattctggatgctgcccgccgagattgggatgaagcgactcacctggctcgacaatttagcaatcaacccatcggtcgatttctgtttactcctttacggttagcgaatcaagaaccggaaatttttcgattagctctagaagcctctgcggatgaagagctgacggctatgcgaaagggaagcaaagtcctagaagctgtgattgctttatctccattactgggactatttggtactattttaggcttgcaaaattccctaggtaaattaaattttgaggaatttggtcaaattgttggtaatccagctttaggaattgaccaggctttaaccagtacattggtaggattggccattgcgattgtttccctgaccttttatcggctgtttcaaggattggtctttaatcaggcgcgtatatttcgacggacggggaatgaactagagctggtctatcgacagttttggctgcagccctccgaaacacggcctgccctgccccctcaaaacgattctcaagaataa

SEQ ID NO: 216 - protein, 222 aa, Acaryochloris marina
VNIIELFEKGGPTIWPLLGLSILAIGTVFERLWFWSNLLKGERKTAKQILDAARRDWDEATHLARQFSNQPIGRFLFTPLRLANQEPEIFRLALEASADEELTAMRKGSKVLEAVIALSPLLGLFGTILGLQNSLGKLNFEEFGQIVGNPALGIDQALTSTLVGLAIAIVSLTFYRLFQGLVFNQARIFRRTGNELELVYRQFWLQPSETRPALPPQNDSQE

SEQ ID NO: 217 - DNA, 654 bp, Acaryochloris marina
atgcagtttggccaagtgattattgcgggaggagtggtgatgctcccgctcatggttttttcgttaattgcgatcgcactgatttttgaacgcctcatcttttggacgagggtgaatcgcaaccagttgcggatcgtcaaacaggcactgcagctttatcgccaagataatgtctatgacgccttgaggtatctccaagagcaagcaagatttccgattgcccggatattcttagctgccttgtccttagaagacccgacaccggaagaattccgattggcattagaaagtgaagctcaagctgaattgccgacattgaaacgatttacgacggtgtttgacaccatcattagtatttcccctttactcggcctattagggacggtattgggcctgatcaactccttctcctccctagatgtaggcaatatcggcggtagtgaatcagcagaagtcaccgggggaataagtaccgccctaatttcaacggctgcgggattgattgtcgccatttcaaccctgatttttgccaatatgtttcgcagtttatatcagcgccagttggcctttattcaagagcatggggggcagttggagttgctttatcgtcaccgctatgaaagaggcagggtgaatcatgcgcttacccgatga

SEQ ID NO: 218 - protein, 217 aa, Acaryochloris marina
MQFGQVIIAGGVVMLPLMVFSLIAIALIFERLIFWTRVNRNQLRIVKQALQLYRQDNVYDALRYLQEQARFPIARIFLAALSLEDPTPEEFRLALESEAQAELPTLKRFTTVFDTIISISPLLGLLGTVLGLINSFSSLDVGNIGGSESAEVTGGISTALISTAAGLIVAISTLIFANMFRSLYQRQLAFIQEHGGQLELLYRHRYERGRVNHALTR

SEQ ID NO: 219 - DNA, 642 bp, Anabaena variabilis
atgggaattttgaatctatttacagccggtggcgtggttatgtggcctctgctggcgttctctttattagcagtagcgctaatcatcgaacgtatcagcttttgggtaagaatttcgggcaagcaaaaccgtatagtacgggaagttcttagactttaccagctagataatgtggttagcaccttggaagcattaaggcaaaatgtcgatttgcccatcgcgcgaatctttctcgctgctttagaattggaggagccgacaccagaggaatttcgattagctttagaaagtgaagcccaagctgagatacctgtactcaaacgctttcaaaatatttttgataccataattggtctcgcgcccttattagggttacttggtactgttttgggattaattaattcctttgcatctttaaacatcggtgatgtgggaggaacaaaaacggctggtgtgacggctggtattagtgaagccttagtttctactgcatctggcttagttgttgctatctttaccctgttttttgctaatagtttccgggggttatatcagcgtcaaatagcttggattcaggagtatggaggacagttagaattactctaccgtcgtcgttacgagaggagaggcaagcagagttga

SEQ ID NO: 220 - protein, 213 aa, Anabaena variabilis
MGILNLFTAGGVVMWPLLAFSLLAVALIIERISFWVRISGKQNRIVREVLRLYQLDNVVSTLEALRQNVDLPIARIFLAALELEEPTPEEFRLALESEAQAEIPVLKRFQNIFDTIIGLAPLLGLLGTVLGLINSFASLNIGDVGGTKTAGVTAGISEALVSTASGLVVAIFTLFFANSFRGLYQRQIAWIQEYGGQLELLYRRRYERRGKQS

SEQ ID NO: 221 - DNA, 720 bp, Anabaena variabilis
gtggatattatagatttgttttacaagggtgggccggcaatgtggcctttgctagctctgtcgatattatccttgagtgtaatttttgagcgcctttggttctggttgcgacttttctcacaagaaaaagcgatcgttgaccgagttctagatgcagctcatgataactgggaaatagcggcggatattgccagacaggctacagaccaaccaattggccgatttctctatgctcccttacatttacaaaaaactgacgcagaaacttttcgattagcactggagtccacagcagaggacgaattagccggaatgcgtcggggcgaaaagttattagaagctgttattgccctcgctcccctactcggattgttgggtacagttttaggtttaatccagtctttacgctcaattcgcattggtgatttgggaactgaatcggcggctggagtaacaacgggtattggtgaatccttaattagtacggcagcagggctaatagttgccattgttagtttggtattttaccgactatttcaaagttttgtggtcaatcaactaaaagttttccgtaaagccgggaatgaaatggaattgttatatcgccagtctccacctgatttgagcaaccccagaccagcaattgtccgtgatgctttacctagcaaaactggtaggggtaagttttcacaaccacctgaaccaccaaatttaccttag

SEQ ID NO: 222 - protein, 239 aa, Anabaena variabilis
VDIIDLFYKGGPAMWPLLALSILSLSVIFERLWFWLRLFSQEKAIVDRVLDAAHDNWEIAADIARQATDQPIGRFLYAPLHLQKTDAETFRLALESTAEDELAGMRRGEKLLEAVIALAPLLGLLGTVLGLIQSLRSIRIGDLGTESAAGVTTGIGESLISTAAGLIVAIVSLVFYRLFQSFVVNQLKVFRKAGNEMELLYRQSPPDLSNPRPAIVRDALPSKTGRGKFSQPPEPPNLP

SEQ ID NO: 223 - DNA, 654 bp, Anabaena variabilis
atgggaatccaaaatctttttgcagcaggcggcgtagtcatgtggcctctgttaggtttttctgtgttgggagtagcattgattgttgagcgtgccagattttggctaaaaatcaacaatcgccaacagcgcgtagttagagatgtgttgaacctctatcggctagataatgtagttggcgcaatagataaactcagaaaaaatgtagatttaccactggcgcgtgtctttttatcggctttggaattagaagaaccaacaccggaggaatttcgcctggcgctagaaagcgaagctcaagccgaaatccccgtactcaagcgatttcaaaatattttcgacacaattatcggtttagcaccgctcttaggtttgctgggtacagtgttaggtttgattacttccttcgcttctttagatattggtgatgtgggagggacaaaaaccgcaggtgtgacggcgggtattagtgaagctttagtatctacagcagcaggattggtagtggcaatattcacactgttttttgccaactcctttcggggactttacaccagacagatggcactatttcaggagtatggcggtcaattagaattactttaccgccgccgctacgaaagaggagagaggacttatgcgtctacaagatga

SEQ ID NO: 224 - protein, 217 aa, Anabaena variabilis
MGIQNLFAAGGVVMWPLLGFSVLGVALIVERARFWLKINNRQQRVVRDVLNLYRLDNVVGAIDKLRKNVDLPLARVFLSALELEEPTPEEFRLALESEAQAEIPVLKRFQNIFDTIIGLAPLLGLLGTVLGLITSFASLDIGDVGGTKTAGVTAGISEALVSTAAGLVVAIFTLFFANSFRGLYTRQMALFQEYGGQLELLYRRRYERGERTYASTR

SEQ ID NO: 225 - DNA, 744 bp, Chlorobaculum tepidum
atgaagcagggattttttacggcgatactgattgtggtgacctacgcggtatcccttggtttttatgtctggatgggcacaacaccaccggagtccatgttccatgccgtctggaaaggcgggccgatcgtgtcggtgctgatggcgctgattctgatggtgatcgcctacatcgtcgagcggatcgtcgcgctaaacaaagcttccggcaaaggctccatcacggagttcgtacaaagcctcaagcaggatgtcgattcgggctccatcgaccaggccatctcccgctgtgacgaccaccagagctccctctccgccgtgctccgcgccgtgctcgaccgctacaagatgctcgccgtacacaacgtgaccgaccgtgagaagcgcatcagcgagatgcagaaagctgtcgaggaggcgaccctcatggagatgccgctgctcgaaaagaacctcgtcgccatctcgaccatcgcctcgatctccacgatggtcggcctgctcggtaccacgctcggcatgatccgcgccttctcggcgatggccaccagcggcgcgcccgacgcggtgcagctctcgctcggcatctccgaggcgctcttcaacacggcgctcggcattctcggcggtatcatgggcatcgtcacctacaacgtctttaccagccgggttgaccgcttcagctaccagatcgacgaggcggcgttctacattatccagacccttggcagcagtaaatcctga

SEQ ID NO: 226 - protein, 247 aa, Chlorobaculum tepidum
MKQGFFTAILIVVTYAVSLGFYVWMGTTPPESMFHAVWKGGPIVSVLMALILMVIAYIVERIVALNKASGKGSITEFVQSLKQDVDSGSIDQAISRCDDHQSSLSAVLRAVLDRYKMLAVHNVTDREKRISEMQKAVEEATLMEMPLLEKNLVAISTIASISTMVGLLGTTLGMIRAFSAMATSGAPDAVQLSLGISEALFNTALGILGGIMGIVTYNVFTSRVDRFSYQIDEAAFYIIQTLGSSKS

SEQ ID NO: 227 - DNA, 696 bp, Cyanobacteria Yellowstone B-Prime
atgatccagggttggtactactccatccccctgttgacgttctcggtcttctcagtggcctgttgcattgagcgggtgctgttttggtggaagatcacccatcggcaggaggaggtggtgcagcaagccctgagccagtaccgccgcaacccacgcgctgcccagtatttgctggagcaaaatgccgatctgccgattgcccgcatctttttggccgggttggagctgaacgaggccagcccggaagattttaagctggctctggaaacggccctggcggcagaagtgcctctgctgaagcgcttcaacactgtcttcgacaccgtaatcaccgttgcccccttcttgggcttgttgggcaccgtcaccggcatcatccagatcctcagctccattcaactgggggatatcggcggcaccgatacccagggggtaggtcgggggatcgccgaagccttgtactcgacggcctttggactgattgtggctattcccaccctgttgatttccaacgtcttccgctctttgtacctgcggcaactctctaagatccaagagtacggcggcatgctggagctgctgcatcggcagcggcaagagatgcaggcccaacagctttcccagtattcctacacccaatctagccccagtggcagctccacccttcccccctactcctcgcttgagccctcctaa

SEQ ID NO: 228 - protein, 231 aa, Cyanobacteria Yellowstone B-Prime
MIQGWYYSIPLLTFSVFSVACCIERVLFWWKITHRQEEVVQQALSQYRRNPRAAQYLLEQNADLPIARIFLAGLELNEASPEDFKLALETALAAEVPLLKRFNTVFDTVITVAPFLGLLGTVTGIIQILSSIQLGDIGGTDTQGVGRGIAEALYSTAFGLIVAIPTLLISNVFRSLYLRQLSKIQEYGGMLELLHRQRQEMQAQQLSQYSYTQSSPSGSSTLPPYSSLEPS

SEQ ID NO: 229 - DNA, 690 bp, Cyanothece sp.
gtgaatatccaagaaattatgacaaaaggcggagtggctatgtggccgcttctgattttgtcagtattagctttaagtaccattattgaacgctctatattttggatacgatttttgctcaaagaaggaaaaatcttgaatcgagtcctcgaaactgctgctcgcaattgggatgctgcgccgaaagtggctaaagagaatagtaaacatcctatgggcagttttctctatggtcctctgagattagataaccccgatccagaggttttccatttagccctagaatcatcggccgatgacgaactggccttgatgagacgaggggataaggtattagaagcggtgattgctctgtctcccttattaggattactggggacggtattgggactgattacctctttaggcaacatccaaattagcgatctcggcacttcctcaaccacaggtgttaccctgggtattggagaagcccttatttcaactgcgacaggattgattgttgccattattagtttgaccttttatcggattttccagtccctgtggtctaatcaggtaaggatttttcgtaaagccggtagtgagttagaagtaatttatcgtcaacgctggtctgatagcgaagttaatccctctgctttttctggcaatactccctcaaagtttacagacacttttgatcaataa

SEQ ID NO: 230 - protein, 229 aa, Cyanothece sp.
VNIQEIMTKGGVAMWPLLILSVLALSTIIERSIFWIRFLLKEGKILNRVLETAARNWDAAPKVAKENSKHPMGSFLYGPLRLDNPDPEVFHLALESSADDELALMRRGDKVLEAVIALSPLLGLLGTVLGLITSLGNIQISDLGTSSTTGVTLGIGEALISTATGLIVAIISLTFYRIFQSLWSNQVRIFRKAGSELEVIYRQRWSDSEVNPSAFSGNTPSKFTDTFDQ

SEQ ID NO: 231 - DNA, 681 bp, Cyanothece sp.
atgactcatatttacgatttatttttgaaaggaggtccagtgatgtggcctctcttagctttatcggttttcactatcaccattgccttagaaagaacttggttttggataagacttttaagccaagaaaatcgtattgtccatgacgttttagaaacagcacgttacgatctcttagaagctcaaaaaatcgctcaacacgcccgttttttacccattggacgctttttattagcccccctgcaactaaaaaaaccaagccctgaaaccttccgtttggcaatggaagctaggggagacagagaatttattcaaatgagaaaaggggataaatttctcgaaacggtgattgccgttgcccccttattaggcttattaggaacggtaacgggattgattacaacttttaataatttaaaaataggagaaggggcaaatcttgcagaaacgtctcaagctgctgctggtatttctgaagctttaattaccacagcagccgggatgattgtggcgattattgctttattagtttatcgtgtttctgttactttacaaagtggacaagttgagtattttgctgaagttggtacagatttagaactgatttatcgacagttttggtatgagcctgaattagaagaaaaacaaaaattttcgactgctttacctcctactatatag

SEQ ID NO: 232 - protein, 226 aa, Cyanothece sp.
MTHIYDLFLKGGPVMWPLLALSVFTITIALERTWFWIRLLSQENRIVHDVLETARYDLLEAQKIAQHARFLPIGRFLLAPLQLKKPSPETFRLAMEARGDREFIQMRKGDKFLETVIAVAPLLGLLGTVTGLITTFNNLKIGEGANLAETSQAAAGISEALITTAAGMIVAIIALLVYRVSVTLQSGQVEYFAEVGTDLELIYRQFWYEPELEEKQKFSTALPPTI

SEQ ID NO: 233 - DNA, 654 bp, Cyanothece sp.
atgtcgatcaaaaactttttagtagctggtggcatcgttgcctggccattgcttgtgttttccctattaggcgtggctttaattattgaacgtatcatcttttggtatcggattaagtctcgtgaacgaaagatcatcaccactgtcttgaaactttatcaagggaatgaacccatagcagcgatcgcaaaattgaagcaaaatgcggatttaccgatgtgtcgcatttttttagaagctttagtccttcaggatgccacaccgacagagtttcgtttagccttagagacggcaactcaagcagaactccctctttttaaacgctttaatactatttttcagaccattattgcagtttcaccgttgttgggactattaggaaccattttgggactcatgcgctcttttgcgtctcttgacattggtaatgttagtggaaccaacgctactaatgtcactggagggatctcagaagcgttaacctcgacggtgatggggttagtggtagcgattatgaccctattatttgctaactcgtttcgttctttatacctacaacaatttgccctagttcaagaatatgcaggtcaattagaactattgtatcgtcgtttctacgagagaggagataaaccctatgcagttacccgatga

SEQ ID NO: 234 - protein, 217 aa, Cyanothece sp.
MSIKNFLVAGGIVAWPLLVFSLLGVALIIERIIFWYRIKSRERKIITTVLKLYQGNEPIAAIAKLKQNADLPMCRIFLEALVLQDATPTEFRLALETATQAELPLFKRFNTIFQTIIAVSPLLGLLGTILGLMRSFASLDIGNVSGTNATNVTGGISEALTSTVMGLVVAIMTLLFANSFRSLYLQQFALVQEYAGQLELLYRRFYERGDKPYAVTR

SEQ ID NO: 235 - DNA, 654 bp, Fremyella diplosiphon
atggggataaaaaatttatttgctgcgggtggcgtggttatgtggcccctgctggctttctctgttgtggcgttagctttgattgttgagcgtgtgcggttttggtatcgagtcaatactcgccaagccaaggtagtacgagagattctcaatctctatcggatggataatgtggtgggagctattgaaaagtcccgtcagaatgcaaatttaccgattccccggattttccttgcagcgttggaattagaagaaccgactccagaagagtttcgcttggcgttagaaagtgaagcacaagcggaactaccaattatcaaacgtttcaacacaatttttgacacaatcatcggactttcgccactatttggcttgttgggtacggtattgggtttgattgtttcattcgcttccctcaaccttggtgatgttggtgggacaaaaactgcaggtgtgacatcagggattagtgaagcgcttgtttccacagcttccggtttaattgtggcaatttttaccctgttctttgctaattctttccgaggattggctcaacgtcaaactggcttgattcaagaatatggtgggcaattagaactgttgtaccgccgtcgttatgaacgaggagacaaagtctatgcgtctacaagatga

SEQ ID NO: 236 - protein, 217 aa, Fremyella diplosiphon
MGIKNLFAAGGVVMWPLLAFSVVALALIVERVRFWYRVNTRQAKVVREILNLYRMDNVVGAIEKSRQNANLPIPRIFLAALELEEPTPEEFRLALESEAQAELPIIKRFNTIFDTIIGLSPLFGLLGTVLGLIVSFASLNLGDVGGTKTAGVTSGISEALVSTASGLIVAIFTLFFANSFRGLAQRQTGLIQEYGGQLELLYRRRYERGDKVYASTR

SEQ ID NO: 237 - DNA, 663 bp, Gloeobacter violaceus
atgaatctccttgctgatctttaccgctttgttgtcaacgattggtggattgctgtgccgctgctgctgtgttcggttttgaccatcgccgtggtcaccgagcgctggctctacatcaaccgcaacaagaccgacgtcgatcgctttattgtccggctgcagcgcgaactcgagcgcgccaacctttctggagcgcgcaatctctgcgaacaggtaggcggcgtgattggcgaagtggccgaggatggggtgcggctgctttctgtgccgcgcgtcaagtttgagcaggccttcgacatcaccatcaacctgggcatgcgcaaattcgaaaagcacctcaacgtgctgggcacgatcggggcggtcgccccctttatcggcctgctcggcacggtggtcggcatcttgcgctccttccagacgtttgcaggcgaaggggcgaccagcaacaaactggcggccgaaatcggctttgcgctgattgccacggcggcgggcctcatcgtcgccatcgcctcggtcgtggcctacaacatctttcaaaacatcgtcgcccagttcgaagacgactttcagctgctcaagctgctgtttctcaactttgccgacaccgccgaatttgaaggcgaggtggtcgaagaatccaccattccccagcagtag

SEQ ID NO: 238 - protein, 220 aa, Gloeobacter violaceus
MNLLADLYRFVVNDWWIAVPLLLCSVLTIAVVTERWLYINRNKTDVDRFIVRLQRELERANLSGARNLCEQVGGVIGEVAEDGVRLLSVPRVKFEQAFDITINLGMRKFEKHLNVLGTIGAVAPFIGLLGTVVGILRSFQTFAGEGATSNKLAAEIGFALIATAAGLIVAIASVVAYNIFQNIVAQFEDDFQLLKLLFLNFADTAEFEGEVVEESTIPQQ

SEQ ID NO: 239 - DNA, 636 bp, Gloeobacter violaceus
atggcagtaatagactggtttgtgcggggcggcatcgtcatgtggccgatgctgctgtgctcgatcatcgccctggccatcatcatcgagcgcatcatctactacgtccgcctgctgccgcgccagaaggctttcgtcgaacaggccttcgccaccgagcgctaccagcccgaccagctcaggcggctgattaacgaaaatgcggacattccgctgggtcggatcttcggttcggcgctctcggtgcgcaccgacgacgagacggccttccgcctggcgatcgaaggggcggccaaaaccgagatcccgaagctgaagcgcttcgtgtcggtactggacacgatcgtgaccttgtcgccgttgttgggtctgttgggaacggtgctgggtctgatcaattcctttgcgtcgctggggttgggtacggaggcctccagcaagggtctggaagtggcgggtggcatttccgaggcgctgattgcgacggcgacggggatgatggtggcgctgtttacgctgatatttgcgagtttgtttcgggcgttggcccgccgtcagattgtgctgatggagacggcggggacgcagctggagttgcgctggcggatggcggagaccgagggagtgaagcgatga

SEQ ID NO: 240 - protein, 211 aa, Gloeobacter violaceus
MAVIDWFVRGGIVMWPMLLCSIIALAIIIERIIYYVRLLPRQKAFVEQAFATERYQPDQLRRLINENADIPLGRIFGSALSVRTDDETAFRLAIEGAAKTEIPKLKRFVSVLDTIVTLSPLLGLLGTVLGLINSFASLGLGTEASSKGLEVAGGISEALIATATGMMVALFTLIFASLFRALARRQIVLMETAGTQLELRWRMAETEGVKR

SEQ ID NO: 241 - DNA, 678 bp, Microcystis aeruginosa
gtgactataactgatttaatccaaaaaggcggagtggccatgtggccgctgctttttctgtctattttagctcttagcactattatcgaacgaatttggttttggagtcgtactctcctcagtgagggccagattttaaatcgcattatggaatccgccatccgtaactgggatttggcggcaaaagtcgctggagattcccgcaatcaccccattggtagctatctctacgcacccctgcgcttagaaaatccagatccagaggtttttcactttgccctcgaatcggctgccgatgaacaattatccctaatgaaacggggcgataaaatccttgaggcagtcattgccctttctcccctgttaggattattagggacggtactcggtttaattacctctttggccaatattcaattaagtgacctgggaacttcctcgacggcgggagtaactttaggtattagtgaagctttaatttccaccgctaccggcttaattgtcgctatttttagcctcgctttctatcgtgtttttcagggactctggttcaatcaagcccgaatttttcgcaaggccggcagtgatttagaaattatctaccgccaacgctggttacaccaagaagaccaacaatacgccctcagtgctaacctagaaaaacctctcgatcgctaa

SEQ ID NO: 242 - protein, 225 aa, Microcystis aeruginosa
VTITDLIQKGGVAMWPLLFLSILALSTIIERIWFWSRTLLSEGQILNRIMESAIRNWDLAAKVAGDSRNHPIGSYLYAPLRLENPDPEVFHFALESAADEQLSLMKRGDKILEAVIALSPLLGLLGTVLGLITSLANIQLSDLGTSSTAGVTLGISEALISTATGLIVAIFSLAFYRVFQGLWFNQARIFRKAGSDLEIIYRQRWLHQEDQQYALSANLEKPLDR

SEQ ID NO: 243 - DNA, 654 bp, Nostoc punctiforme
atggaaattagtaatctgtttacagcaggtggcgtggtcatgtggcctctcctggcgttctctttgttaggagtagcgctgattatcgagcggatcatcttttgggtaagaataaataatcggcaaaataaggtagtgcgagaggtgctacagctttatcgccttgataatgtagttagtgctttagataagttgcaaaaaaatactgatttacccattgcccgaatttttttagcagctttagagttagaagaggcgacaccagaagaatttcggttggcattagaaagcgaagcacaagccgaaattcccttacttaagcgatcgcaaaatatttttgagacaattattggtcttgcgccgttgttgggacttctcggtactgtcttaggattaattaactcctttgcctctctaaatattggagatgtgggaggtactaaaacaacaggtgtaacatctggaattagtgaagctttagtatccacagcatcaggattagtagtagcaatctttacactattatttgctaatactttccggggactctatcagcgtcagatagcttggattcaagaatatggtggacagttagaattactctaccgccgtcgctacgaaagaggcgataaatcttatgtgcctaccagatga

SEQ ID NO: 244 - protein, 217 aa, Nostoc punctiforme
MEISNLFTAGGVVMWPLLAFSLLGVALIIERIIFWVRINNRQNKVVREVLQLYRLDNVVSALDKLQKNTDLPIARIFLAALELEEATPEEFRLALESEAQAEIPLLKRSQNIFETIIGLAPLLGLLGTVLGLINSFASLNIGDVGGTKTTGVTSGISEALVSTASGLVVAIFTLLFANTFRGLYQRQIAWIQEYGGQLELLYRRRYERGDKSYVPTR

SEQ ID NO: 245 - DNA, 729 bp, Nostoc punctiforme
gtggatattttagatttattttataagggcgggccagcgatgtggcctttacttgtcctgtcgattctatctttgagtgtgatttttgagcgtttgtggttctggttgcgaattttgactcaggaaaagcaaatagttgatcgcattctggatgctgcacaagataattggcaagcagctgctgacattgccaaacaagcaagccatcaacctgtcgggcgttttctctatgcccctttacgttttgcaaaaactgatgtggaaacctttcgactagcacttgaggctacagcagaagatgaattggctggaatgcggcgcggcgaaaagcttttagaggctgtgattgccctcgcgcccctgctgggattgttgggtacagttctgggtctaatccagtctctgcgctcaattcggattggcgatttgggaactgaatctaccgccggagtgactactggtattggtgaatccttaattagtacggcaactgggttaatagttgccattattagcttggcattttatcgactatttcaaagttttgtagttaaccaagtcaaagtttttcggaaggcagggaatgagatggaattactctaccgccagtccccccctgattttagtaatattacatcaccaattgtccgggaaaatttcactccaccccgcaagccaggaaagactaggttgcctgaacctcctgaacccccgaatttacctaattag

SEQ ID NO: 246 - protein, 242 aa, Nostoc punctiforme
VDILDLFYKGGPAMWPLLVLSILSLSVIFERLWFWLRILTQEKQIVDRILDAAQDNWQAAADIAKQASHQPVGRFLYAPLRFAKTDVETFRLALEATAEDELAGMRRGEKLLEAVIALAPLLGLLGTVLGLIQSLRSIRIGDLGTESTAGVTTGIGESLISTATGLIVAIISLAFYRLFQSFVVNQVKVFRKAGNEMELLYRQSPPDFSNITSPIVRENFTPPRKPGKTRLPEPPEPPNLPN

SEQ ID NO: 247 - DNA, 654 bp, Nostoc punctiforme
atgggaattcagaatttgtttgcagcaggcggtgtggtcatgtggcccctgttggcgttttcggtattgggtgtggcactgatcatcgagcggatcaggttttgggtacggattaatcagcgtcaaaaccgtgtagtgcgagatgttttgaatctctaccgtcttgataatgttgtcggcgcaatggataaacttcagaaaaacgcagatttaccattggcacggatttttcttgcggctttagaattggaagagccaaatccagaagaatttcgtttggcgttagaaagcgaatcccaggctgagatacctgtgttaaaacgttttcaaaacattttcgagacaatcattagtctggcaccactgttgggtcttctcggcacagtattaggattgatagcctcctttgcttccctaaatcttggtgatgtgggaggtagcaaaacgacaaatgttaccgccgggattagtgaagctttggtatcaacagcatcaggattaatagttgctatattcatactcatgtttgccaataccttccggggattgtatcaaaggcaaattgccttaattcaagagtatgggggacagttagaattactctaccgtcgtcgttatgaaagaggagaaaaaacttatgcgtctaccagatga

SEQ ID NO: 248 - protein, 217 aa, Nostoc punctiforme
MGIQNLFAAGGVVMWPLLAFSVLGVALIIERIRFWVRINQRQNRVVRDVLNLYRLDNVVGAMDKLQKNADLPLARIFLAALELEEPNPEEFRLALESESQAEIPVLKRFQNIFETIISLAPLLGLLGTVLGLIASFASLNLGDVGGSKTTNVTAGISEALVSTASGLIVAIFILMFANTFRGLYQRQIALIQEYGGQLELLYRRRYERGEKTYASTR

SEQ ID NO: 249 - DNA, 654 bp, Nostoc sp.
atgggaatccaaaatctttttgcagcaggcggcgtggtcatgtggccgctattaggtttttctgtgttgggagtagcactgattgttgagcgtactaggttttggctgaaaatcaacaatcgtcaacagcgcgtagttagagatgtgttaaacctctatcggctagataatgtagttggcgcaatagacaagctcagaaaaaatgtagatttgccattggcgcgtgtgtttttatcggctttggaattagaagaaccaacaccagaggaatttcgcttggcgctagaaagcgaagctcaagccgaaataccattactcaaacgatttcaaaatatttttgacacaattattggtctagcaccccttttaggcttgctgggtacagtgttaggtttgattacttccttcgcttctttagatattggcgatgtgggaggtacaaaaaccgcaggtgtgacggcggggatcagcgaagctctagtatctacagcagcaggattggtcgtggcaatattcacactgttttttgccaactcctttcggggactttacaccagacagatggcactatttcaagagtatggcggtcaattagaattactttatcgccgccgctatgaacgaggagagagaacctatgcgtctacaagatga

SEQ ID NO: 250 - protein, 217 aa, Nostoc sp.
MGIQNLFAAGGVVMWPLLGFSVLGVALIVERTRFWLKINNRQQRVVRDVLNLYRLDNVVGAIDKLRKNVDLPLARVFLSALELEEPTPEEFRLALESEAQAEIPLLKRFQNIFDTIIGLAPLLGLLGTVLGLITSFASLDIGDVGGTKTAGVTAGISEALVSTAAGLVVAIFTLFFANSFRGLYTRQMALFQEYGGQLELLYRRRYERGERTYASTR

SEQ ID NO: 251 - DNA, 642 bp, Nostoc sp.
atgggaattctgaatctatttacagccggtggtgtggttatgtggcctctgctggcgttctccttattagcggtagcactaatcatcgaacgtatcagcttttgggtaagaattttgggcaagcaaaacctcatagtacgggaagttctgagactttaccaactagataatgtggttagcaccttagaagcattacggcaaaatgccgatttacccatcgcgcgaattttcctcgccgctttagaattggaggagccgacaccagaagaatttcgattggctttagaaagtgaagcccaggctgagatacctgtactcaaacgctttcaaaatatttttgataccataattggtctcgcgcccttattagggttacttggtactgttttgggattaattaattcctttgcatctttagacatcggtgatgtgggaggaacaaagacggctggtgtaacggctggtattagtgaagccttagtttctactgcatctggcttggttgttgctatcctgacactgttttttgctaatagtttccggggtttctatcagcgtcaaattgcctggattcaggagtatgggggacagctagaattactctaccgtcgtcgttacgagaggagaggcaagcaaggttga

SEQ ID NO: 252 - protein, 213 aa, Nostoc sp.
MGILNLFTAGGVVMWPLLAFSLLAVALIIERISFWVRILGKQNLIVREVLRLYQLDNVVSTLEALRQNADLPIARIFLAALELEEPTPEEFRLALESEAQAEIPVLKRFQNIFDTIIGLAPLLGLLGTVLGLINSFASLDIGDVGGTKTAGVTAGISEALVSTASGLVVAILTLFFANSFRGFYQRQIAWIQEYGGQLELLYRRRYERRGKQG

SEQ ID NO: 253 - DNA, 720 bp, Nostoc sp.
gtggatattatagatttgttttacaagggtgggccggcaatgtggcctttgctggctctgtcgattttatccttgagtgtgatttttgagcgcctttggttctggctgcgacttttctcacaagaaaaagcgatcgttgaccgagttctagatgcagctcatgataactgggaaatagcgggggatattgctagacaggctacagaccaaccaattggtcgatttctctatgctcccttacatttacaaaaaactgacgcggaaacctttcgattagcactggagtccacagcagaggacgaactagccggaatgcgtcggggcgaaaagttattagaagctgtcattgccctcgctcccttactaggattgttgggtacagttttaggtttaatccagtctttacgctcaattcgcattggtgatttgggaactgaatcggcggctggagtaacgacgggtattggtgaatccttaattagtacggcagccgggctaatagttgccattgttagtttggtattttaccgattatttcaaagttttgtagtcaatcaactcaaagttttccgtaaagcggggaatgaaatggaattgttatatcgccagtctccgcctgatttgagcaaccccacaccagcaattgtccgtgatgctttaccgagcaaaactggtaggggtaagtttccgcaaccacctgaaccaccaaatctaccttag

SEQ ID NO: 254 - protein, 239 aa, Nostoc sp.
VDIIDLFYKGGPAMWPLLALSILSLSVIFERLWFWLRLFSQEKAIVDRVLDAAHDNWEIAGDIARQATDQPIGRFLYAPLHLQKTDAETFRLALESTAEDELAGMRRGEKLLEAVIALAPLLGLLGTVLGLIQSLRSIRIGDLGTESAAGVTTGIGESLISTAAGLIVAIVSLVFYRLFQSFVVNQLKVFRKAGNEMELLYRQSPPDLSNPTPAIVRDALPSKTGRGKFPQPPEPPNLP

SEQ ID NO: 255 - DNA, 987 bp, Rhodopseudomonas palustris
atgccagcccgccatcctgcaccggttccggaaaatagccgctttgagccagaacaaaccgcgtccggtgggtttatgcgatggcctccggcatcggacccgggggccagaattgatttcgggtggccggcgatccgtgcgatagctcgcggccccgcgccgaacgtctttgcctgtcgaaagtggatgatgccgccattttgcgtcccgccgatgatccgcaatctcgtcaacgccagcgcgctcgggttcgtggtcgcgctgttacacggcaccgccgcttatgccgccgccgatatcgccagcctgccgcgcgacctgtcggcctggggcatgttcaagaacgccgacattgtcgtgaaggtggtgatggccggcctcgcgctggcgtcgctcgcgacctggacggtgtggctgtcgaagaccatcgagctgcggcgcgaaaccgcgcgcgcccgcgatggtctcagcaagctcgaaaccgataccacgctggccgagctcggccgcggcagcgagggtgcgcatgacgcggtgtctcagctgatccagacggcggcgcgcgaaggcagcctgtcgggctggactttcgatgccgacttcaaggagcgcgtcgcgctgcggctggagcgggtcgaagcggcgatggcgcgcaagatcgccagcggcaccggcattctcgccaccgtcggcgcggtggcgccgttcgtcggcctgttcggcacggtgtggggcatcatgaacgccttcatcggcatttccgaagcgcacactaccaatctggcggtggtggcaccgggcatcgccgaggcgctgctggcgaccgcgctcggcctggtcgccgcggtgccggcggtggtgatctacaactatctggtccgcgccattgcgacctatcgggcgctgcttggcgacgcctcggcgcaggtgctgctgctcgtcagccgcgaccgcggccgctcggcgcggcagatgcgggcagggtga

SEQ ID NO: 256 - protein, 328 aa, Rhodopseudomonas palustris
MPARHPAPVPENSRFEPEQTASGGFMRWPPASDPGARIDFGWPAIRAIARGPAPNVFACRKWMMPPFCVPPMIRNLVNASALGFVVALLHGTAAYAAADIASLPRDLSAWGMFKNADIVVKVVMAGLALASLATWTVWLSKTIELRRETARARDGLSKLETDTTLAELGRGSEGAHDAVSQLIQTAAREGSLSGWTFDADFKERVALRLERVEAAMARKIASGTGILATVGAVAPFVGLFGTVWGIMNAFIGISEAHTTNLAVVAPGIAEALLATALGLVAAVPAVVIYNYLVRAIATYRALLGDASAQVLLLVSRDRGRSARQMRAG

SEQ ID NO: 257 - DNA, 798 bp, Rhodopseudomonas palustris
gtgcgtaaaccccaaggcgccgcggcagggcgggcgggcgcagcgatcgcggcggtcgccttcattgccgcggcgctgccgggggatgcgtgggcggcggccgatcttgcgacgctgccgcgcgacctgtcgccctgggggatgttcctcggcgccgatgcggtggtgaggaccgtgatggtcgggctggcgctggcttcgctcgctgcatggacggtgtggctggcgaagtcgatcgaactgcgccgcagcgttgcggtggcgcagcgtggtctcgaaaggctggagagcgacgtcacgctgcagcaggctgcggctgagaccgccgatcagcacgatgcggtggcgcagatgatccagaccgtcgatcgcgaggccagcctgtccggcggcgcccatgacgacggcttccgtgagcgggtggcgctgcggctggagcgggtcgaggctgcggaagcgcgccgcgccgcgatcggcacgggtctgctcgcgagcattggcgcggtggcgccgttcgtcggcctgttcggcacggtgtgggggatcatgaacgcgttcatcggcatttcgaaagccaacaccaccaatcttgcggtggtggcgccgggcatcgccgaggcgctgctcgccacggcgctcgggctcgtcgccgcgatcccggcggtggtgatctacaatcatctgacccggcgagtgacggcgtatcgagcgctactcggcgacgcgtcgacccaattgctgctgatgatcagccgcgaggcgacgcggccggcgcaacgtgcccgcatggtgaggtaa

SEQ ID NO: 258 - protein, 265 aa, Rhodopseudomonas palustris
VRKPQGAAAGRAGAAIAAVAFIAAALPGDAWAAADLATLPRDLSPWGMFLGADAVVRTVMVGLALASLAAWTVWLAKSIELRRSVAVAQRGLERLESDVTLQQAAAETADQHDAVAQMIQTVDREASLSGGAHDDGFRERVALRLERVEAAEARRAAIGTGLLASIGAVAPFVGLFGTVWGIMNAFIGISKANTTNLAVVAPGIAEALLATALGLVAAIPAVVIYNHLTRRVTAYRALLGDASTQLLLMISREATRPAQRARMVR

SEQ ID NO: 259 - DNA, 651 bp, Synechococcus elongatus
gtgaatattctgacgctgttccaaaaaggcggccttgcgatgctgccgctgactggcctgtcgatcttggcattgggtaccatctttgagcgggcttggttctggtacgccctcctcaagcaagagagccagatcgtccatcgggtcttggatgctgctgaccaagattgggacttagcggcagaagttgccagtcgggctaagaattcaccgatcgggcgtttcctcgcggctccgttgcagttacagcagcccgatccagagctcttccggcttgccctagaggcctccgctgaagaagaacttgccaacatgcggcgtggcgacaagctgctagaggcagtgatcgcaatttcgccgctcttgggactgttgggaaccgtcttgggtctgattcaaaccctcggcaacctgcggattggtgatttgggcagttcctcgactgctggcgtgagcgctgggatcggagaagccttgatcactacagccactggcttgatcgtggcgatcgtcgctttggccgcctatcgagtcttccaaggactcattgttcagcaaatgaaagtcttccggcgggcgggcaatcaactcgaactgatgtatcgccaagcttgggcacggcgtggcctccccagccagtcgctccgctag

SEQ ID NO: 260 - protein, 216 aa, Synechococcus elongatus
VNILTLFQKGGLAMLPLTGLSILALGTIFERAWFWYALLKQESQIVHRVLDAADQDWDLAAEVASRAKNSPIGRFLAAPLQLQQPDPELFRLALEASAEEELANMRRGDKLLEAVIAISPLLGLLGTVLGLIQTLGNLRIGDLGSSSTAGVSAGIGEALITTATGLIVAIVALAAYRVFQGLIVQQMKVFRRAGNQLELMYRQAWARRGLPSQSLR

SEQ ID NO: 261 - DNA, 717 bp, Synechococcus sp.
atggatagagtcttgcagctcctgatccagggttggtactattccatccccctgttgacgttctcagtcttctcggtggcctgttgcatcgagcgggccttgttttggtggaaagtcacccaccggcaggaggaggtggtgcggcaagccctgagccagtaccgccgcaacccacgcgctgcccagtacctgctggagcaaaatgcggatctccccattgcccgcatctttttggccggcctggagctgaacgaagccagccccgaagattttaagctggccctggagacagccttggcggcagaggtgcccctgctgaagcgcttcaatacggtcttcgacaccgtcattaccgttgcccccttcctgggcctgctgggcaccgttaccggcatcatccagatcctcagctccatccaactgggggatatcggcggcaccgatacgcaaggggtagggcaggggatcgccgaagccctctactcgaccgcttttgggctgatcgtggccattcccactttgctaatctccaacgtcttccgctctctgtacctgcggcagctctccaagatccaggagtacggcggcgagctggagttgctgcatcgccagcggcaagagatgcaagcccaacagctttcccagtattcttacgccaagcccagccccagcggcagctccactcttcctccctactccccccttgagccctcctag

SEQ ID NO: 262 - protein, 238 aa, Synechococcus sp.
MDRVLQLLIQGWYYSIPLLTFSVFSVACCIERALFWWKVTHRQEEVVRQALSQYRRNPRAAQYLLEQNADLPIARIFLAGLELNEASPEDFKLALETALAAEVPLLKRFNTVFDTVITVAPFLGLLGTVTGIIQILSSIQLGDIGGTDTQGVGQGIAEALYSTAFGLIVAIPTLLISNVFRSLYLRQLSKIQEYGGELELLHRQRQEMQAQQLSQYSYAKPSPSGSSTLPPYSPLEPS

SEQ ID NO: 263 - DNA, 648 bp, Synechococcus sp.
atgaacatcacaaatttctttgccgccggtggcatcgttgcttatcccttgttcctcttctctttggccggtgtagcctgcattattgagcgagccgttttttggtggcggattaatcgtcggcagcgtcaagttgtccgggacgccctcggtctatatcggcaagatccgttcaatgcgatgaaatttttgaagcgtaacgcggatctacccattgcccggatttttttagaagcccttgatttagaaaatcccaacagtgaagagtttcgtctcgccctcgaaagtgcaacccaagccgaaatcccgaccctaaaacggtttaatactgtgtttgacacaattattgctgttgcgcccctactgggattgttgggaacgatcctcggtttgatgcaatccttttcggcgctcaacattggtgatgtgggtaataccaatgccgctggggtgactggtggaattagtgaagcattggtttcgactgtgatgggtctggttgtggcaatcttcaccctgctctttgccaatctctttaatgggttatatcaacgtaacttagcatttatccaagagtatggtggccagttagaattactatatcgccgcttctatgaaaagagtgaagaagcaattatgaaccgctaa

SEQ ID NO: 264 - protein, 215 aa, Synechococcus sp.
MNITNFFAAGGIVAYPLFLFSLAGVACIIERAVFWWRINRRQRQVVRDALGLYRQDPFNAMKFLKRNADLPIARIFLEALDLENPNSEEFRLALESATQAEIPTLKRFNTVFDTIIAVAPLLGLLGTILGLMQSFSALNIGDVGNTNAAGVTGGISEALVSTVMGLVVAIFTLLFANLFNGLYQRNLAFIQEYGGQLELLYRRFYEKSEEAIMNR

SEQ ID NO: 265 - DNA, 765 bp, Synechocystis sp.
gtgctggataattgcaagagattattatttagaaaatttccctgttttctgtccatggccccatcccccctgtttttgactcaaactccgcggctactcgatgagtttcttaagggaggggtagtgatgtttcctttgttactgctgtccatccttgcccttaccactgccttcgaacgaggttggttttggagtcgcctactgattcaagaagaccaggttgtgcgggatgtgctcgatgcggcggttgaggatttggtaaaggctcgggaaattgctgaacatgctcgacatttagccattggtcgttttctgctggctccccttaaactacgccatcctagtccagaaactttccgtttggccatggaagccaccgccgataaagaatttgcccgaatgcgacggggggataaactcctggaaactatcattgccctagctcctctcttgggcttgttaggcaccgtaacgggcttaattcgcacttttaacaatctcaatatcgggggaggaggctccagtgcggaggctacccaggccgcctcgggcattggagaagcgttgattaccacggcagcggggatgatggtggcgatttttgccctgttagtatttagggttttggtcagtttacagtcccaacaaatggattattttgccgcagtgggcagtgaattagaacttatttaccgtgaggtctggtacgaacctcatcagccaatgcccaatttattaatggcggctagaattgctgagccataa

SEQ ID NO: 266 - protein, 254 aa, Synechocystis sp.
VLDNCKRLLFRKFPCFLSMAPSPLFLTQTPRLLDEFLKGGVVMFPLLLLSILALTTAFERGWFWSRLLIQEDQVVRDVLDAAVEDLVKAREIAEHARHLAIGRFLLAPLKLRHPSPETFRLAMEATADKEFARMRRGDKLLETIIALAPLLGLLGTVTGLIRTFNNLNIGGGGSSAEATQAASGIGEALITTAAGMMVAIFALLVFRVLVSLQSQQMDYFAAVGSELELIYREVWYEPHQPMPNLLMAARIAEP

SEQ ID NO: 267 - DNA, 684 bp, Synechocystis sp.
gtgaatcccattgagttgatgcaaaagggcggcgtggccatgtggcccctgcttctcctatcgattttgtccgtcagcaccatcatcgagaggttgtggttttggggccaagtcattctcaaaagctcccaaacggcttcccgtattttagacacggcggcccgggattgggatacggccattcgagtcgcccaggacagtcgtcgttttcccattgctaaatatctgttggctccattgcgtttgccccacccagacccagaggtttttcacctggcgttggagtcggcggcggacgatcaattggctctcatgcggcggggagacaaaattctggaagccattattgccctgtcccccctattgggactgttgggtaccgtgttgggtttgatccaatcccttagttccatccaaattagcgatttgggtacagcttccaccgctggagtcacccttggtattggggaagcactgatttccacagcggccggtttgatcatagccattgttagtttggccttttaccgtgtgtttcaggggctatggttcaaccaaatgcgagtcttccgtaaagtaggcagtgaactagaggtgctctatcgccaacgctggtttgaagaggaaatggcctacgatgacggcctaacccccagcccggaagcggaaagtttgccccaatag

SEQ ID NO: 268 - protein, 227 aa, Synechocystis sp.
VNPIELMQKGGVAMWPLLLLSILSVSTIIERLWFWGQVILKSSQTASRILDTAARDWDTAIRVAQDSRRFPIAKYLLAPLRLPHPDPEVFHLALESAADDQLALMRRGDKILEAIIALSPLLGLLGTVLGLIQSLSSIQISDLGTASTAGVTLGIGEALISTAAGLIIAIVSLAFYRVFQGLWFNQMRVFRKVGSELEVLYRQRWFEEEMAYDDGLTPSPEAESLPQ

SEQ ID NO: 269 - DNA, 855 bp, Thermosynechococcus elongatus
atgcggttgccgctgatagggataaagatacactcatgcgaggtatcgctccatgaacgtaatcacctatttagacagggcagcaaagacaatggttcaagacccttggcagtgcgctttgccagaatttgggaaacaattactgctacgggctggactatactaaacctcggatgctctaacagggaatcgatcgtgaatatcgctgaaatttttaaccgtggtggcctggccatgtggccactactgatcctctcgatcttgaccttaggcaccatttttgagcggctttggttttggggcatggttctccgaggagaaaccaaactggcagagcaaattctggatgccgctcgccacgattggcaagaagcgcttgagctagcagccaatgcctgtgatcaacccattgggcgcttcctctacactcctttacaactgattgacaccaacccagaaatctttcgcttggctctagaggctgcggctgatgaggaactgagtgccatgcggcgaggcgaaaaggtcctagaggcaacgattacaatggcacctctcctgggtttgttgggaacggtgctcggtctaattagtgccctcagttctattcgcttgggagatattggcacacccgcaaccctgggcgtgggtctgggcattagtgaggccttaattagtaccgcatctggcttggtgatcgcgattattgcccttgcctttcagcggctctttcaagcttttctcttgcagcaggcacaaatttttcgtcgcactggcaatgaattagaactcacctatcgccaagcatggcttgagcagcggatcaaaggggaagccgaaaaaaccttgttctaa

SEQ ID NO: 270 - protein, 284 aa, Thermosynechococcus elongatus
MRLPLIGIKIHSCEVSLHERNHLFRQGSKDNGSRPLAVRFARIWETITATGWTILNLGCSNRESIVNIAEIFNRGGLAMWPLLILSILTLGTIFERLWFWGMVLRGETKLAEQILDAARHDWQEALELAANACDQPIGRFLYTPLQLIDTNPEIFRLALEAAADEELSAMRRGEKVLEATITMAPLLGLLGTVLGLISALSSIRLGDIGTPATLGVGLGISEALISTASGLVIAIIALAFQRLFQAFLLQQAQIFRRTGNELELTYRQAWLEQRIKGEAEKTLF

SEQ ID NO: 271 - DNA, 786 bp, Trichodesmium erythraeum
gtgacttttgaagagctgattcagaagggaggccccgctatgtggcctttgttagttttatcaatcttgtcccttagtaccataattgatcgcatctggttctggacaagtctattaattaaggaaaaacaaacggttaatagggtattagagtcggcacgccgtgactggagcatagcaacagaaatggcaagacgtaaccagaaacaacctataggtcgttttttatacgcacctttacgactacaacatccagaaccggaagtatttaagttggcactggaggctgctgctgatgatgagttggcctcaatgcgaaagggagataagttacttgaaggagtaattgctttggctcctatgttaggcttactgggtactgttttaggtcttattggttccctaggatcaattcgtctaggtgatctgggtacttcttccactgctggggtaacagtaggtattggtgaagctttaattagtacagctactggtttggtagtagctatttttagtctggtattttatcgattatttcaaagtttattgtttaatcaaatgaaggtttttcggaaggctggcaatgagttggagttgctctaccgacaatattggcaacaggtatttttaagtagttcatcagaaaatcaaaatcctggtttttctacttcatttattcagaatactcagaataatataaatactttagaaccagatcaaaaacccacagattttttatctgaaaatgatcctgaacaatctcaagataattctcatgatcaatga

SEQ ID NO: 272 - protein, 261 aa, Trichodesmium erythraeum
VTFEELIQKGGPAMWPLLVLSILSLSTIIDRIWFWTSLLIKEKQTVNRVLESARRDWSIATEMARRNQKQPIGRFLYAPLRLQHPEPEVFKLALEAAADDELASMRKGDKLLEGVIALAPMLGLLGTVLGLIGSLGSIRLGDLGTSSTAGVTVGIGEALISTATGLVVAIFSLVFYRLFQSLLFNQMKVFRKAGNELELLYRQYWQQVFLSSSSENQNPGFSTSFIQNTQNNINTLEPDQKPTDFLSENDPEQSQDNSHDQ

SEQ ID NO: 273 - DNA, 633 bp, Chroococcales cyanobacterium
gttgccggtggcattgttgcctggccattactagcattctctctcttaggagtagctctgattatcgaacgttttttgttttggtttcagataaaagctcgtgaaaaaagagttgtaaacactgttttgaaactctatcaagggaatgaaccaatggcagcgatcgccaaattaaagaaaaatgctgatttacccttgtgccgtatttttctagaagcattaatcctctatgatgctactcccacagagtttcgcttagcactagaaacagcaactcaaggtgaactccccctcttaaaacgttttaatactgtctttcaaactatcattgcagtatcaccgttattgggactattaggaaccattttaggtttaatgcgttcttttgctgctttagatattgggaatactggcggaacaaatacaggtgcagtgactggaggtatatcagaagctttgacttccacagtaatggggttagtggtagctattgcaattctattattttctaactcatttcgttctttgtatctcaaagaatttgccctaattcaagaatatgcaggtcaattagaacttttatatcgtcgtcattacgaaaaaggaaataaaccctatgcgactaccagatga

SEQ ID NO: 274 - protein, 210 aa, Chroococcales cyanobacterium
VAGGIVAWPLLAFSLLGVALIIERFLFWFQIKAREKRVVNTVLKLYQGNEPMAAIAKLKKNADLPLCRIFLEALILYDATPTEFRLALETATQGELPLLKRFNTVFQTIIAVSPLLGLLGTILGLMRSFAALDIGNTGGTNTGAVTGGISEALTSTVMGLVVAIAILLFSNSFRSLYLKEFALIQEYAGQLELLYRRHYEKGNKPYATTR

SEQ ID NO: 275 - DNA, 2194 bp, Oryza sativa; identical to SEQ ID NO: 201

SEQ ID NO: 276 - DNA, 1264 bp, Oryza sativa
tcgacgctactcaagtggtgggaggccaccgcatgttccaacgaagcgccaaagaaagccttgcagactctaatgctattagtcgcctaggatatttggaatgaaaggaaccgcagagtttttcagcaccaagagcttccggtggctagtctgatagccaaaattaaggaggatgccaaaacatgggtcttggcgggcgcgaaacaccttgataggtggcttaccttttaacatgttcgggccaaaggccttgagacggtaaagttttctatttgcgcttgcgcatgtacaattttattcctctattcaatgaaattggtggctcactggttcattaaaaaaaaaagaatctagcctgttcgggaagaagaggattttgttcgtgagagagagagagagagagagagagagagagagagagaaggaggaggaggattttcaggcttcgcattgcccaacctctgcttctgttggcccaagaagaatcccaggcgcccatgggctggcagtttaccacggacctacctagcctaccttagctatctaagcgggccgacctagtagccacgtgcctagtgtagattaaagttgccgggccagcaggaagccacgctgcaatggcatcttcccctgtccttcgcgtacgtgaaaacaaacccaggtaagcttagaatcttcttgcccgttggactgggacacccaccaatcccaccatgccccgatattcctccggtctcggttcatgtgatgtcctctcttgtgtgatcacggagcaagcattcttaaacggcaaaagaaaatcaccaacttgctcacgcagtcacgctgcaccgcgcgaagcgacgcccgataggccaagatcgcgagataaaataacaaccaatgatcataaggaaacaagcccgcgatgtgtcgtgtgcagcaatcttggtcatttgcgggatcgagtgcttcacagctaaccaaatattcggccgatgatttaacacattatcagcgtagatgtacgtacgatttgttaattaatctacgagccttgctagggcaggtgttctgccagccaatccagatcgccctcgtatgcacgctcacatgatggcagggcagggttcacatgagctctaacggtcgattaattaatcccggggctcgactataaatacctccctaatcccatgatcaaaaccatctcaagcagcctaatcatctccagctgatcaagagctcttaattagctagctagtgattagctgcgcttgtgatc

SEQ ID NO: 277 - DNA, 51 bp, Artificial sequence
  primer: prm14244
ggggacaagtttgtacaaaaaagcaggcttaaacaatggccgggggcatag

SEQ ID NO: 278 - DNA, 52 bp, Artificial sequence
  primer: prm14243
ggggaccactttgtacaagaaagctgggttcatcgggaagtcgcatactctt

SEQ ID NO: 279 - DNA, 3419 bp, Artificial sequence
  expression cassette pGOS2::ExbB::terminator
aatccgaaaagtttctgcaccgttttcaccccctaactaacaatatagggaacgtgtgctaaatataaaatgagaccttatatatgtagcgctgataactagaactatgcaagaaaaactcatccacctactttagtggcaatcgggctaaataaaaaagagtcgctacactagtttcgttttccttagtaattaagtgggaaaatgaaatcattattgcttagaatatacgttcacatctctgtcatgaagttaaattattcgaggtagccataattgtcatcaaactcttcttgaataaaaaaatctttctagctgaactcaatgggtaaagagagagattttttttaaaaaaatagaatgaagatattctgaacgtattggcaaagatttaaacatataattatataattttatagtttgtgcattcgtcatatcgcacatcattaaggacatgtcttactccatcccaatttttatttagtaattaaagacaattgacttatttttattatttatcttttttcgattagatgcaaggtacttacgcacacactttgtgctcatgtgcatgtgtgagtgcacctcctcaatacacgttcaactagcaacacatctctaatatcactcgcctatttaatacatttaggtagcaatatctgaattcaagcactccaccatcaccagaccacttttaataatatctaaaatacaaaaaataattttacagaatagcatgaaaagtatgaaacgaactatttaggtttttcacatacaaaaaaaaaaagaattttgctcgtgcgcgagcgccaatctcccatattgggcacacaggcaacaacagagtggctgcccacagaacaacccacaaaaaacgatgatctaacggaggacagcaagtccgcaacaaccttttaacagcaggctttgcggccaggagagaggaggagaggcaaagaaaaccaagcatcctcctcctcccatctataaattcctccccccttttcccctctctatataggaggcatccaagccaagaagagggagagcaccaaggacacgcgactagcagaagccgagcgaccgccttcttcgatccatatcttccggtcgagttcttggtcgatctcttccctcctccacctcctcctcacagggtatgtgcccttcggttgttcttggatttattgttctaggttgtgtagtacgggcgttgatgttaggaaaggggatctgtatctgtgatgattcctgttcttggatttgggatagaggggttcttgatgttgcatgttatcggttcggtttgattagtagtatggttttcaatcgtctggagagctctatggaaatgaaatggtttagggtacggaatcttgcgattttgtgagtaccttttgtttgaggtaaaatcagagcaccggtgattttgcttggtgtaataaaagtacggttgtttggtcctcgattctggtagtgatgcttctcgatttgacgaagctatcctttgtttattccctattgaacaaaaataatccaactttgaagacggtcccgttgatgagattgaatgattgattcttaagcctgtccaaaatttcgcagctggcttgtttagatacagtagtccccatcacgaaattcatggaaacagttataatcctcaggaacaggggattccctgttcttccgatttgctttagtcccagaattttttttcccaaatatcttaaaaagtcactttctggttcagttcaatgaattgattgctacaaataatgcttttatagcgttatcctagctgtagttcagttaataggtaatacccctatagtttagtcaggagaagaacttatccgatttctgatctccatttttaattatatgaaatgaactgtagcataagcagtattcatttggattattttttttattagctctcaccccttcattattctgagctgaaagtctggcatgaactgtcctcaattttgttttcaaattcacatcgattatctatgcattatcctcttgtatctacctgtagaagtttctttttggttattccttgactgcttgattacagaaagaaatttatgaagctgtaatcgggatagttatactgcttgttcttatgattcatttcctttgtgcagttcttggtgtagcttgccactttcaccagcaaagttcatttaaatcaactagggatatcacaagtttgtacaaaaaagcaggcttaaacaatggccgggggcatagtggcggtgcccctcctcggtttttccctgttagctgtggccctgattatcgagcgtgcctatttttggagtcagatccagttacggcaaaatcggttggtaaatgatgtgctcaagctttatcgcagtaatcccccaggggcgatcgccaagctgaaacaaaatgcggatttacccatggcacgaatttttctcgaagccctgtgtttggagggggccacaccaacggagtttcgcctggccctggaaagcgctacccaagcagaattaccgcttttaaaacgatttaacaccctatttcagaccattatcaccgtttcccctctcctgggcttactggggacaattttgggactaatgcgttccttttcttccatgagtttaggcagtaccaccgccgccaatgcctcgggggtcaccggggggatcagtgaagcattggtgtccaccgtgatgggcttggtagttgccattgccactctcctctttgccaacgtgttccgttccctctatctgcgccaattcgccctcatacaggagcaaacggggcaaatcgaattggtatatcgccgtttccatgaccaaccggaggaaaaagagtatgcgacttcccgatgaacccagctttcttgtacaaagtggtgatatcacaagcccgggcggtcttctagggataacagggtaattatatccctctagatcacaagcccgggcggtcttctacgatgattgagtaataatgtgtcacgcatcaccatgggtggcagtgtcagtgtgagcaatgacctgaatgaacaattgaaatgaaaagaaaaaaagtactccatctgttccaaattaaaattcattttaaccttttaataggtttatacaataattgatatatgttttctgtatatgtctaatttgttatcatccgggcggtcttctagggataacagggtaattatatccctctagacaacacacaacaaataagagaaaaaacaaataatattaatttgagaatgaacaaaaggaccatatcattcattaactcttctccatccatttccatttcacagttcgatagcgaaaaccgaataaaaaacacagtaaattacaagcacaacaaatggtacaagaaaaacagttttcccaatgccataatactcgaac

SEQ ID NO: 280 - DNA, 2490 bp, Artificial sequence
  expression cassette pRs::ExbB::terminator
tcgacgctactcaagtggtgggaggccaccgcatgttccaacgaagcgccaaagaaagccttgcagactctaatgctattagtcgcctaggatatttggaatgaaaggaaccgcagagtttttcagcaccaagagcttccggtggctagtctgatagccaaaattaaggaggatgccaaaacatgggtcttggcgggcgcgaaacaccttgataggtggcttaccttttaacatgttcgggccaaaggccttgagacggtaaagttttctatttgcgcttgcgcatgtacaattttattcctctattcaatgaaattggtggctcactggttcattaaaaaaaaaagaatctagcctgttcgggaagaagaggattttgttcgtgagagagagagagagagagagagagagagagagagagaaggaggaggaggattttcaggcttcgcattgcccaacctctgcttctgttggcccaagaagaatcccaggcgcccatgggctggcagtttaccacggacctacctagcctaccttagctatctaagcgggccgacctagtagccacgtgcctagtgtagattaaagttgccgggccagcaggaagccacgctgcaatggcatcttcccctgtccttcgcgtacgtgaaaacaaacccaggtaagcttagaatcttcttgcccgttggactgggacacccaccaatcccaccatgccccgatattcctccggtctcggttcatgtgatgtcctctcttgtgtgatcacggagcaagcattcttaaacggcaaaagaaaatcaccaacttgctcacgcagtcacgctgcaccgcgcgaagcgacgcccgataggccaagatcgcgagataaaataacaaccaatgatcataaggaaacaagcccgcgatgtgtcgtgtgcagcaatcttggtcatttgcgggatcgagtgcttcacagctaaccaaatattcggccgatgatttaacacattatcagcgtagatgtacgtacgatttgttaattaatctacgagccttgctagggcaggtgttctgccagccaatccagatcgccctcgtatgcacgctcacatgatggcagggcagggttcacatgagctctaacggtcgattaattaatcccggggctcgactataaatacctccctaatcccatgatcaaaaccatctcaagcagcctaatcatctccagctgatcaagagctcttaattagctagctagtgattagctgcgcttgtgatcatttaaatcaactagggatatcacaagtttgtacaaaaaagcaggcttaaacaatggccgggggcatagtggcggtgcccctcctcggtttttccctgttagctgtggccctgattatcgagcgtgcctatttttggagtcagatccagttacggcaaaatcggttggtaaatgatgtgctcaagctttatcgcagtaatcccccaggggcgatcgccaagctgaaacaaaatgcggatttacccatggcacgaatttttctcgaagccctgtgtttggagggggccacaccaacggagtttcgcctggccctggaaagcgctacccaagcagaattaccgcttttaaaacgatttaacaccctatttcagaccattatcaccgtttcccctctcctgggcttactggggacaattttgggactaatgcgttccttttcttccatgagtttaggcagtaccaccgccgccaatgcctcgggggtcaccggggggatcagtgaagcattggtgtccaccgtgatgggcttggtagttgccattgccactctcctctttgccaacgtgttccgttccctctatctgcgccaattcgccctcatacaggagcaaacggggcaaatcgaattggtatatcgccgtttccatgaccaaccggaggaaaaagagtatgcgacttcccgatgaacccagctttcttgtacaaagtggtgatatcacaagcccgggcggtcttctagggataacagggtaattatatccctctagatcacaagcccgggcggtcttctacgatgattgagtaataatgtgtcacgcatcaccatgggtggcagtgtcagtgtgagcaatgacctgaatgaacaattgaaatgaaaagaaaaaaagtactccatctgttccaaattaaaattcattttaaccttttaataggtttatacaataattgatatatgttttctgtatatgtctaatttgttatcatccgggcggtcttctagggataacagggtaattatatccctctagacaacacacaacaaataagagaaaaaacaaataatattaatttgagaatgaacaaaaggaccatatcattcattaactcttctccatccatttccatttcacagttcgatagcgaaaaccgaataaaaaacacagtaaattacaagcacaacaaatggtacaagaaaaacagttttcccaatgccataatactcgaac

SEQ ID NO: 281 - DNA, 1389 bp, Synechocystis sp.
atgaatactaatctcattctggatgtggactcctataaagtgagccactggttgcagtatcctcctgacacaacggcaatgtattcctatgtggaaagtcgtgggggaaggtatcctgtcactgtcttttttggtctccaatacattttaaagcggtatctgactcaatccattgaaccctggatggtggaggaagctaatcgccttttgacagcccatggcttacctttcaactatggcggttggcgatacattgcggaggatttgcagggtcgtttacctgtacgtattaaggcggttccagagggctcggtcatcccggttcataatgttttgatgacagtggaatccacggacccaaaggttttttggttagtttcctggttagaaactttgttgatgcgggtttggtatcccattacggtggcaacccagagttggcatttaaaacaacgcatctatcaatccctatgccgtactgcggatgatcctgatggtgaaatcaattttaaactccacgattttggggcccggggggtttctagtggtgaatcgtccggcattggcggactggctcacttagttaatttccaaggttctgacacagtaaaggccctggtgtatgggcagcaatattacaactgccccatggcggcctattcgattcccgccgcagaacattccaccattacagcttggggaagggaaggggaagttttggcctatgaaaatatgttgacccagtttgccaagccagggtcggtgttggcggtggtttccgattcctatgatctctggaatgccattgaccatctctggggcgatcacctaagggcacaggtgcttgattcgggggctacggtggttatccgtccggattcaggtgacccggtggccattgtggcccaaactttggaacggttggaggcttgttttggcagcaccctcaacagtaagggctttcgagttctaaatgctgtgcgggttatccaaggggatggggttgatgaagagagtatcagcgccattctagagaagactgagagccttggctttagtactactaatttagcttttggtatggggggagctttgttgcaaaaggtgaatcgggatacccaaaaatttgccatgaagtgcagtgaggtaacggtggaggacaaggcgatccctgtttataaagaccctgttactgatcctggtaaaactagcaaaaaggggcgattatccctggttaaaactgactctggttatggcactgtacccacttcttctgaggatttattgcaggttgtctatgaaaatggacatttactgcaagaccaatgcttggatgctattcgtcaacgagcctggccattaatcagggtcaatgttcccgcaagctag

SEQ ID NO: 282 - protein, 462 aa, Synechocystis sp.
MNTNLILDVDSYKVSHWLQYPPDTTAMYSYVESRGGRYPVTVFFGLQYILKRYLTQSIEPWMVEEANRLLTAHGLPFNYGGWRYIAEDLQGRLPVRIKAVPEGSVIPVHNVLMTVESTDPKVFWLVSWLETLLMRVWYPITVATQSWHLKQRIYQSLCRTADDPDGEINFKLHDFGARGVSSGESSGIGGLAHLVNFQGSDTVKALVYGQQYYNCPMAAYSIPAAEHSTITAWGREGEVLAYENMLTQFAKPGSVLAVVSDSYDLWNAIDHLWGDHLRAQVLDSGATVVIRPDSGDPVAIVAQTLERLEACFGSTLNSKGFRVLNAVRVIQGDGVDEESISAILEKTESLGFSTTNLAFGMGGALLQKVNRDTQKFAMKCSEVTVEDKAIPVYKDPVTDPGKTSKKGRLSLVKTDSGYGTVPTSSEDLLQVVYENGHLLQDQCLDAIRQRAWPLIRVNVPAS

SEQ ID NO: 283 - DNA, 1494 bp, Aureococcus anophagefferens
atggacaacatcctcctgctcacggactcctacaaggtcagccactggaagcagtacccggcgaagacgacgacggtctatagctacttcgagtcccgcggcggcaagtacgacgaggtcgtcttcttcggcctccagtactacgtcaagaagtacctcgtcggcgagcaggtcacgaaggcgaagatcgacgaggcggagcggttctacggcgagcacttcccgccgggcttcgagtttaaccgcgcgggctgggagcacatcctcgagaagcacggcggccggctgccgctgcgcatcaaggccgcgcccgagggcacggtcgtcggcgcgaagaacgtgctcatgaccgtcgagaacacggacccggcgtgcttctggctcacgaactttgtggagacgctcctggtccaggtctggtacccgatgaccgtggcgacgcactcgcgggagcagaagaaggtcgtggccaagtacttggatgtgacgggcgacgtcgccggcctgggcttcaagctccacgacttcgggttccgcggcgtgtcgtccgtcgagaccgccggcgtcgggtcctgcgcgcacctcgtcaacttcctgggcacggacacggtcgcgggtctcgtcgtggccaaggactactacggcgccgagtccgcggcggggttcagcatccccgcgtcggagcactcgacgatcacgtcgtggggcgagagccgggaagtcgacgcgatgcggaacatgctcgaggtctacccggcgggcctcgtggcctgcgtctccgactcctacgacatcttcaaggcctgcggcgacctgtggggcacgcagctcaaggacgcggtgctcgcgcgcgacgggtgcctcgtcgtccggcccgactcgggcgacccgccgtcgacggcgatgcgcgtgctgaccatcctcggcgacaagttcggcaaggagaagaacgacaagggctactgggtcctcgacagccacgtgcgcgtcatctggggcgacggcatcgactacgagatgatctgcgccgtgctgtcgacgctcgcggacgcgggctggtccgcggacaacatcggcttcggctccggcggcggcctgctccagaagctgaaccgcgacacgcagaagtgcgccttcaagtgctcgtccatcgtcgtcgacggcgcggcgcgcgacgtcttcaaggaccccgtcacggacaagggcaaggcgtcgaagaaggggcgcctcgcgctcgtggacgtcgacgggacgctgacgacgaagacgcagtgcgcgccggggcccgtcgagggcgacgtgctcgcgaccgtcttcgaggacggcgcgctcctcgtcgacgacacgctcgagaccgtccgcgagcgcgcggcgctgccgccgctggacacgttgccgctgccccgcggcaagagcgccgcgccgccgccgccgttgaagaagcccgaggtcctcgccgcgtgcccgacgctcggcggcatgctcggcttctag

SEQ ID NO: 284 - protein, 497 aa, Aureococcus anophagefferens
MDNILLLTDSYKVSHWKQYPAKTTTVYSYFESRGGKYDEVVFFGLQYYVKKYLVGEQVTKAKIDEAERFYGEHFPPGFEFNRAGWEHILEKHGGRLPLRIKAAPEGTVVGAKNVLMTVENTDPACFWLTNFVETLLVQVWYPMTVATHSREQKKVVAKYLDVTGDVAGLGFKLHDFGFRGVSSVETAGVGSCAHLVNFLGTDTVAGLVVAKDYYGAESAAGFSIPASEHSTITSWGESREVDAMRNMLEVYPAGLVACVSDSYDIFKACGDLWGTQLKDAVLARDGCLVVRPDSGDPPSTAMRVLTILGDKFGKEKNDKGYWVLDSHVRVIWGDGIDYEMICAVLSTLADAGWSADNIGFGSGGGLLQKLNRDTQKCAFKCSSIVVDGAARDVFKDPVTDKGKASKKGRLALVDVDGTLTTKTQCAPGPVEGDVLATVFEDGALLVDDTLETVRERAALPPLDTLPLPRGKSAAPPPPLKKPEVLAACPTLGGMLGF

SEQ ID NO: 285 - DNA, 1428 bp, Burkholderia phytofirmans
atgcaaaacgagtccagcggtcccgacgatatcgcgtcgatcctgtccaatccgatcctcaacacggattcgtacaaggcgtcgcactacctgcaatatccgcccgaagcgtcggcgatgttttcatacatcgaatcgcgcggcgggcgctacgaccgcacgctgttcttcggcctgcagatgctgatcaaggaatatctgtgccgaccgatcacgccggccatgatcgagcaggccaaggcatttttcacggcgcacggcgagccgttcaacgaagcgggctggcgctacatcgtcgaacatcacggcggctatctgccggtgcgcatccgtgcggtgccggaaggctcggtcgtgccgacacacaacgtgctcgtcacggtggaatgcgacgacccgcaggtgttctggctggcgtcgtatctggagaccatgctgctgcgcgtgtggtatccgattacggtcgcgacacaaagctggcatctgcgcgagacgatacgcggctatctgctgaagagcagcgacgacctcgcgcaattgccgttcaagctgcacgacttcggcgcgcgcggcgtgtcgagcgcggagtcggcggcgatcggcggcgcggcgcatctcgtcagcttcatgggctcggataccgtgctcggtgtggtcgcggcgaaccactactacaacgaaaccatggcggcgttttccgtgccggcggcggagcacagcacgatcacctcgtggggccgcgagcgcgaaaccgacgcgtttcgcaacatgatcgcgcgcttcggcaagccgggcgcaatcgtgtcggtggtatccgactcctatgatctgttcgccgcgctgaacgcctggggcacggagttaaagcaggcggtgctcgactccggcggcacgctggtcatccggcccgactctggcgatccgcaaaccatcgtgctgcaaacgctgcgggcattggaggcgtcgttcggatcggtggtgaacggcaaagggcggcgtgtgctcaacaacgtgcgcgtgatccagggcgacggcgtcaatcccgattcgatcgaagcaactctcgccaccatggaccaggccggtttcgctacggacaacatcgtgttcggcatgggcggtgcgctgttgcagcagatcaatcgcgacacgcagcgcttcgcgatgaagtgctcggcaatccggttaggcgacgagtggcacgacgtgctcaaggaccctgtcacggacgccggaaagcgctccatgaaagggcggctgacgctgctgaagaatcaccacacgggcgagtatcgaacgaccacgctgcccgttgccgtcgaaggcgattgggaagaagcgttggtgacagtgttcgattccggcaagctgctggtcgatatgtcgcttgctgaaatcagaagccgcgctcacgcgcacgaaggctaa

SEQ ID NO: 286 - protein, 475 aa, Burkholderia phytofirmans
MQNESSGPDDIASILSNPILNTDSYKASHYLQYPPEASAMFSYIESRGGRYDRTLFFGLQMLIKEYLCRPITPAMIEQAKAFFTAHGEPFNEAGWRYIVEHHGGYLPVRIRAVPEGSVVPTHNVLVTVECDDPQVFWLASYLETMLLRVWYPITVATQSWHLRETIRGYLLKSSDDLAQLPFKLHDFGARGVSSAESAAIGGAAHLVSFMGSDTVLGVVAANHYYNETMAAFSVPAAEHSTITSWGRERETDAFRNMIARFGKPGAIVSVVSDSYDLFAALNAWGTELKQAVLDSGGTLVIRPDSGDPQTIVLQTLRALEASFGSVVNGKGRRVLNNVRVIQGDGVNPDSIEATLATMDQAGFATDNIVFGMGGALLQQINRDTQRFAMKCSAIRLGDEWHDVLKDPVTDAGKRSMKGRLTLLKNHHTGEYRTTTLPVAVEGDWEEALVTVFDSGKLLVDMSLAEIRSRAHAHEG

SEQ ID NO: 287 - DNA, 1521 bp, Chlamydomonas reinhardtii
atgcttcctgtcggtgttcccataagcgtcttgacggacagttacaaggcgacacacttcctgcaatatcctaaagctcagaagatggtcgcgtatggcgagttccgtcaaggattcaataaggataagacagacacacgtttggtgtcctacggcatgcggtacctagttgaaacctatatcagccggcagtggacgatggaggacgtggagatggccgacgcgttctaccggacgcatatggcgccaaaccacacggcgtttcccttcccgcgcgccctcttcgagaagttcgtgcgggaaaacaacggtttcttccccgtgaagttggagacgttgcccgagggcacttgtgcacatgtgcgggtgcccgtgtaccagatcaccgcggtcggcgagtacgcgccgctatgcacgttcttggagaccatcctgaccatgatctggtaccccacctccgtcgcaacgctctcccgccgcgcgcgcgatgtggtggaggccagcttcgcgcgcactagcgacggcggcgtgggcagcccgctggtgcagagcaagctgcacgacttcggcttccgcggctgcaccggcgtggagcagtccatcatcggcggctgcgcgcacttgctcagcttcacgggcagcgacaccatgtcggcggccttctacgcgcagttcaagctgaacggcgggcggcctgtggcgatgtccatccccgccacggagcacagcgtcatgacggcctggcccaccgaggccgctgccatgaacaacatgatcgaccactttggcaccggcatctatgcctgcgtcatggacagctacgactacgccaaggcgctgtcggaggtgctgccgtccgtgtcggtgcacaagctgagcaagggcggctacctggtgctgcggccagacagcggcgaccccacggaggcggtgctcatggcgctggcggcggcggagaaggtgtttggcaccacgcgcaacggcaagggcttcaaggtcatccccggctgcggcgtcatccagggcgacggcatcgatttgcccaccatggagaagatcgcactcgcaattgaggccgcgggctacgccgccgacaacgtgtcttacggcatgggcggcgggctgctgcagaaggtgaaccgcgacaccatgtccttcgccacgaagctcaaccacatcatctacgaggacggccgcgccgccgacatcatgaagcagccgcagaccgacaccggcaagttctcgctgccaggcgtgctggcggtgaagcgcgtggacggcgtgcccacggtgttccccgccgacagcggcgaggtggccccgcacgagaacctgctgcgggtggtgtacgactgcggcccgctggcgggcgtgtgggaggacttcgacaccgtgcgcgcgcgtgtggcggcggagtggacggcgctgcccaagacgtcggacaacatcagcgccagcctgaaggagaaggtgcggcagcaaatggcgctacgcggcaaggtgccggcgttggcccactag

SEQ ID NO: 288 - protein, 506 aa, Chlamydomonas reinhardtii
MLPVGVPISVLTDSYKATHFLQYPKAQKMVAYGEFRQGFNKDKTDTRLVSYGMRYLVETYISRQWTMEDVEMADAFYRTHMAPNHTAFPFPRALFEKFVRENNGFFPVKLETLPEGTCAHVRVPVYQITAVGEYAPLCTFLETILTMIWYPTSVATLSRRARDVVEASFARTSDGGVGSPLVQSKLHDFGFRGCTGVEQSIIGGCAHLLSFTGSDTMSAAFYAQFKLNGGRPVAMSIPATEHSVMTAWPTEAAAMNNMIDHFGTGIYACVMDSYDYAKALSEVLPSVSVHKLSKGGYLVLRPDSGDPTEAVLMALAAAEKVFGTTRNGKGFKVIPGCGVIQGDGIDLPTMEKIALAIEAAGYAADNVSYGMGGGLLQKVNRDTMSFATKLNHIIYEDGRAADIMKQPQTDTGKFSLPGVLAVKRVDGVPTVFPADSGEVAPHENLLRVVYDCGPLAGVWEDFDTVRARVAAEWTALPKTSDNISASLKEKVRQQMALRGKVPALAH

SEQ ID NO: 289 - DNA, 1938 bp, Chlorella vulgaris
atgcacgtgtacccagtcttgctgcttttgaaccaggcaaagattggcagtagccagatagagaacatcaacaatgacgcaaaacgggacctgcttgccgctctgtcgtccgtacaggacaatggcgtgtatggaatagagagtgcccagcgagatgagctactgaagaggattgaggacctggaggcatgcaatcctctggaggctcccactgagcacttggatcagtgccatggctcctggcgcctgctgttctctacagtcaccatcctgggacggaggaggatcaagctagggctgagaaacattgtcaatgtgggggcgctcacacagcacattgacattgtcactcgccacacggtgaataaggtcaatttcgacattctggtgtttggaaagttcaagggtgccttgactattgaagccagctatgagccggtgtccccaaccagagtagccatcaagctggagaaggcgacactgtacggggaatttcgctcgggatatggaggtgacaacgaagacacgcgcatggtgttctttgggatgcgatacattctggagaattacttgttgcggcagtggactgtcgaggatgtggagaaatctgagaagttctacaggacacatatggcgccggccatgactgcattccccttcccaatggacttatttatgcgcttcattgaaaaacatgatggttacttccctatcaggcttgaagcgttgcccgaggggacttgcataaatgcccatgttccagtctatcagatcacatcaaccggggagtttgccccactttgcacataccttgagacaatattgacaatgatctggtaccccacaactgtagcaacgctgagcagacgagcccgcgatgttatagaggcagcctttgagcagagcgtggacgacggtgctgcgtcgccgctggtgccctccaagctccatgactttggcttcaggggctgctgcactgtcgagcagagcgtgctgggcggagtggcccatctgctcaactttgatggcacagacaccctatctgccgcctactacgcacaggcatgcgcatctccaatctttgagttgaacgatggagagccggttggagtcagcataccggcgacagagcacagcgtgatgacggcgtggcccagcgaaagagaggccatcctcaacatgatctcccactttggcagcggcatctttgcctgtgtcatggactcatatgactatgcaaaggcactggcagaggtggtgccaagcattgcacaggaaaaggtaggagcaggcggctacatggtgctcaggccagactctggggatcctatagaagctgtcttggcagcgctggatgctgcggagaaggtgtttggggtggacacaaacaagaaggggtacaaggtgccttgtggttgtggagtcatccagggcgatggcataaaccttcgaatgctgtccaagattctgacagccgtcatggagaagggatatagcgctgaggctgttgcgtttgggatgggcggcggactactgcagaaagtgaacagggacacgctgtcctttgctaccaagctgagccacatagtgtatgcggacggcacccctgctgacatcatgaaggcaccagtcggcgactctgccaagatttcatttccaggggctcttgcagtcaaacgtgtgggtggtgttcctactgtcttcccagctgaaggagggcacgtggcatcagaagagaacttgctgcaggttgtatacgaccacggaccagttcagaacaattggaagagtctcacgaagcttcggcagcaggttgctgaggaatggacggcgcttcctaaagcaccaattgtggtcagtgaggccctatcggagaaggtggcaaagtcttttgcatatgagttcggctttgcaaattctttgggcctccatccttga

SEQ ID NO: 290 - protein, 645 aa, Chlorella vulgaris
MHVYPVLLLLNQAKIGSSQIENINNDAKRDLLAALSSVQDNGVYGIESAQRDELLKRIEDLEACNPLEAPTEHLDQCHGSWRLLFSTVTILGRRRIKLGLRNIVNVGALTQHIDIVTRHTVNKVNFDILVFGKFKGALTIEASYEPVSPTRVAIKLEKATLYGEFRSGYGGDNEDTRMVFFGMRYILENYLLRQWTVEDVEKSEKFYRTHMAPAMTAFPFPMDLFMRFIEKHDGYFPIRLEALPEGTCINAHVPVYQITSTGEFAPLCTYLETILTMIWYPTTVATLSRRARDVIEAAFEQSVDDGAASPLVPSKLHDFGFRGCCTVEQSVLGGVAHLLNFDGTDTLSAAYYAQACASPIFELNDGEPVGVSIPATEHSVMTAWPSEREAILNMISHFGSGIFACVMDSYDYAKALAEVVPSIAQEKVGAGGYMVLRPDSGDPIEAVLAALDAAEKVFGVDTNKKGYKVPCGCGVIQGDGINLRMLSKILTAVMEKGYSAEAVAFGMGGGLLQKVNRDTLSFATKLSHIVYADGTPADIMKAPVGDSAKISFPGALAVKRVGGVPTVFPAEGGHVASEENLLQVVYDHGPVQNNWKSLTKLRQQVAEEWTALPKAPIVVSEALSEKVAKSFAYEFGFANSLGLHP

SEQ ID NO: 291 - DNA, 1500 bp, Chlorella sp.
atgttctcacgcaagcaccggcggcaggagcaggcggcgccagccaaggcggaggcagccgccgctgtcgccgttgccgccgcgccggccaccaccgcagcgccccacttgctcaccagctacctccccatcgcgtatggggagttccgccaggggtatgacaaggacacgagggacacgcgggcggtgttctatggcctgcgatacatcctggaaaactttgtggcccggcggtggaccctgcaggatgtggagctggcagaccgctttttcggctcgcacatggcccccggatacaccgccttcccctacccaaaggacctcttcctcaagttcatcgccgagaacgacggctacatgccggtgcgggtggaggcgctgcctgagggcacgtgcatgcacgcccatgtgcccgtcttccagctgacggctgaggcgccctacgccccgctctgcacctacctggagacgctgctgacccagctgtggtaccccaccacagtggccacccttagccggcggtgcaaggacctgatagcggcagcgtttgagcagagcgtggatgccggccgttccagcccgctcctcaacagccggctgcacgactttgggttcaggggttgcacctgcgtggagcagagcgtgctgggaggggtggcgcacttgctcaactttgatggcacagacacgctgtcggcggcttactacgcccagtttgcgctcaacggcggcaggccggtggggcagagcatccccgccaccgagcacagcgtcatgaccagctggccgtcagagcgtgccgccatctccaacatggtgtcccactttggccgcggcctgtttgccaccgtcatggactcttacgactaccagcgggcgctggacgaggtggtgcctgcggtggctgaggagaagaacgcgcagggcggcttctgggtgctgcggccagactcaggggacccaacagaggcagtgcttcagggcctgcggggcgcggagcgcgcgtttggggcggacgtcaacggcaaggggttcaaggtgctgcgaggcgtcggcgtcatccagggagacggcattgactaccacaacatcgaggccatcctagaggcggtgctggcagcagggtacagcgcagagaacgtggcgtttggcatgggcggcggcctgctgcagcgcctcaaccccgtggatgtgatgaaggcgcccaagactggcccggagaagggctccctgcccgggccgctggcagtcaagcgggtgtcaggcgtgcccaccgtgttcccagcagaccaggtggccccagaggacaacctgctgcaggtggtttacgacaagcggccggtggaggtgcagtgggagagcttcgacaagctgcggcagcgggtggagcgagagtgggcggcgctgccccccgcggcagatgtgctggcggcgccgctgcgggagaagcgggcggcggtggcggcgcgtctgggcgtgcagggccaggtgctggggtag

SEQ ID NO: 292 - protein, 499 aa, Chlorella sp.
MFSRKHRRQEQAAPAKAEAAAAVAVAAAPATTAAPHLLTSYLPIAYGEFRQGYDKDTRDTRAVFYGLRYILENFVARRWTLQDVELADRFFGSHMAPGYTAFPYPKDLFLKFIAENDGYMPVRVEALPEGTCMHAHVPVFQLTAEAPYAPLCTYLETLLTQLWYPTTVATLSRRCKDLIAAAFEQSVDAGRSSPLLNSRLHDFGFRGCTCVEQSVLGGVAHLLNFDGTDTLSAAYYAQFALNGGRPVGQSIPATEHSVMTSWPSERAAISNMVSHFGRGLFATVMDSYDYQRALDEVVPAVAEEKNAQGGFWVLRPDSGDPTEAVLQGLRGAERAFGADVNGKGFKVLRGVGVIQGDGIDYHNIEAILEAVLAAGYSAENVAFGMGGGLLQRLNPVDVMKAPKTGPEKGSLPGPLAVKRVSGVPTVFPADQVAPEDNLLQVVYDKRPVEVQWESFDKLRQRVEREWAALPPAADVLAAPLREKRAAVAARLGVQGQVLG

SEQ ID NO: 293 - DNA, 1389 bp, Deinococcus radiodurans
atgaccaccccgctttcggacctcaacctgattctggacaccgactcgtacaagtcgagccactttttgcagtacccgcccggcaccacccggctgttttcatatctggaatcgcgcggcgggcgctacccggtcacgcgctttttcggcttgcagtacatcctgagccgctacctgacccgccgggtgacgatggagatggtcgaagaagcccgcgccgtcatcgaggcgcacggcgagccgtttccctatgagggctggcggcgagtagtggaggtgcacggcggcaagctgccgctggaaatccgcgcggtgcccgaagggacgctggtgcccatccacaacgtgctgatgagctgcaccaacaccgaccccgagctgccctggctgcccggctggttcgagacgatgctgatgcgggtgtggtatcccaccaccgtctgcacccagagctggcatatccgcgaaatcattcggcaggcgctggaagacacctccgaccgcgccgccgaggagctgcccttcaagctgcacgatttcggctcgcgcggcgtgagcagccgcgaaagcgcgggcatcggcgggctggcgcatctcgtcaactttcagggcagcgacaccctggaggccctgcgggtgggccgcaactactacggcgccgagctggcgggcttttctattcccgccgccgagcactccaccatcaccagctggggcaaggagcacgaggtggacgcctaccgcaacatggtccggcagttcggcaagcccggtaaggtgtacgccgtcgtctcggacagctacgacctgaaacacgccatcaacgtgcactggggcgaaaccttgcggaaagaagtcgaggagagcggcggcaccctggtcgtccgtcccgactccggcgaccccccggcgatggtgcgcctcgcggtgaacgcgctggccgccaagtacggcaccaccaccaactccaagggcttcaaggtgctgcaacacgtccgggtgattcagggcgacggcatagacgagagcaccattcgccagattctgcaaaacctgtacgtggacggcttttccgccgaaaacgtcaccttcggcatgggcggggcgctgctgcaaaaggtggaccgcgacacccagcgcttcgcctacaaggccagcgcgggcctgatcgacggcgaataccggggcatctacaaagacccggtgaccgaccccggcaagcgcagcaaggacggcgtgctggatttggtggaggaaaacggacgcatggtgacccggcagtaccgcaccttcgacaccgatttccccggctcgctgatgcgcaccgtctaccgcgacggcgaactgctggtgcaggacacgctggaggagattcggggacgaggatga

SEQ ID NO: 294 - protein, 462 aa, Deinococcus radiodurans
MTTPLSDLNLILDTDSYKSSHFLQYPPGTTRLFSYLESRGGRYPVTRFFGLQYILSRYLTRRVTMEMVEEARAVIEAHGEPFPYEGWRRVVEVHGGKLPLEIRAVPEGTLVPIHNVLMSCTNTDPELPWLPGWFETMLMRVWYPTTVCTQSWHIREIIRQALEDTSDRAAEELPFKLHDFGSRGVSSRESAGIGGLAHLVNFQGSDTLEALRVGRNYYGAELAGFSIPAAEHSTITSWGKEHEVDAYRNMVRQFGKPGKVYAVVSDSYDLKHAINVHWGETLRKEVEESGGTLVVRPDSGDPPAMVRLAVNALAAKYGTTTNSKGFKVLQHVRVIQGDGIDESTIRQILQNLYVDGFSAENVTFGMGGALLQKVDRDTQRFAYKASAGLIDGEYRGIYKDPVTDPGKRSKDGVLDLVEENGRMVTRQYRTFDTDFPGSLMRTVYRDGELLVQDTLEEIRGRG

SEQ ID NO: 295 - DNA, 2547 bp, Emiliania huxleyi
atgtcctgcttgaagtcctgcctaggcgacgccagcgtcggcagcgcgccgccgaccggcagcagcgacgggcacaacatcctgctcatgacagacggctacaagttttcgcaccacaagcagtacccggtctcatggatgccagagcacgctcgacccggctcgcagagcggcgagtacttcccagccgtgctcttcccgcccaccagcaaggcgccgggtgccaagctgctgcagctcgccaccgttccgggaggaggcagcgactcgctcgtgctcatcaccaacgcgtcgaccgcagtggtcaaggtgctcgggccggcagaggcggacgccgcagcggacatcaactatgcctgcgcggcggtggagtacgcgggcccgctaaaggccggcgcttgccgagaggaggggagaggagaggaggagaggaggcgccgccgacttcgtcctcctcccggacgcgacaaggagggcgccggcgaccacatcgtcttcttcggcctgcagtatttcatcaaggagtatctggcggaggagtttatcgcgcggtacatggccgacgtgcgcatcgccggcccagcgttcgccggcggctgggaccggacgatgttcccgcgcggcgattgggaggcgatggcaagcggcgactacgaatgcacgggcgtgccgacgcccggtgccgtcccgggcgctttgcccatcaagatcgaggccttacccgagggctcgatcgtcgcgcccggcgtcgcgttcttcaagctgaccaacacgcacccccgtttctactggctgccaaacttcctcgagaccctcctcctagcacgcgggatgcacgcgcgcgaacacgcacgcactccgccgtcgttggtctggtaccccacaacggtggcgacgcaggcgcgcgagttccgcaagaccatccaggcgtacagcgttctctcgcagcgggtctcgcaggtcgacttcctgccgggcgagcgcgacttcacgccggagaacatcgccgccgacgaccttccagtccacatcgcgcaagtcttcgacctgctcgactttggctaccggggcgtctcttcgcacgagacggcgggtctcggctcgggtgcctactacaccgccggcttcgagggctccgacacggtcgccggctcgcgcatgctgctccgccactacaacgctgcggacccgaagctgggcggcaccccggtagagagcttccgcgcgatgttcgagcagctgcactgcgccacctccgtcccggcggccgagcactcgacgatcacctcgtgggcggacatgtcccccggcgccgacccggccaagtatgaggcggacgagtacgccgcgtttgtcaacatgatccggcagtacatgccctcctttgcggtctcgctcgtgtcggacggcttcaacatctggaacgcagtcgccaacttgtggccgtcggagaaggtggtcgagggcggcgaggcgggcggcttgtcgatgcgcgccatcatccgcgcgcgcctcaaggcgggccagctcacgctcgtgcgccccgactctggcgagggcgtcgagacgctgccgcagctcctctccctcttccacgccacgctcccggaggcttgggagtcgggcctctcgccgctccggccgctgttcgcgccgaccgacccgcgtcaggcagagtacgaggctgtgtgcgagtcgatccgcaaggcgaagggcttgcccgcgggcgacaacccgttccgtcgcttcgtggggcagcagttccgcatactgcagggcgacggcgtggcgcttgacacggtcggcgacatgtgcgcatcgatcctcgcaaacggcttctgcgtcaacgcggtgcacttcggctccggcggcgggctgctgcagaagctcaaccgcgactccctctccgtcgccttcaagtgctgcgccatgtacgtcggcgggcgcatgtacgccatagggaaggacccgatcgcgggcggcaaaaagtcgtaccccggcaacccgcccgtcctgcgcggcgccgacggcgtgctacggaatcgcggcacctacgacagcgcgggcgagccgagtggcgcgatgctcgaggcccagccgatgtcgtacgccgagttttgcagcggcgtcgagggcgacgtgttgcagcccgtctttgaaaacgggacggtgctggtggacacgccttggagctctatcgtcagccgtgccaaggcgttggcagtccggctggccgaggcgtcgtgcggctccaagtggatgcactgccaccccacaaagatggcggccatgcaggccgagccagcgtttgccgcgctggggctggagaagagcgcagccaagctgggcctgacggcgaccctcgactcgcatgcactcgtcgcggccatcaaggagaagcacgtgtgcgacaagaaggcggccgaaaccgggggttgccgtgcttactgccgagaggcggccaagaaggtgctcgccgccattgccgagagcgacatggcggctgccgagaaggcaatgaagggcaagatcatgctgacactgtga

SEQ ID NO: 296 - protein, 848 aa, Emiliania huxleyi
MSCLKSCLGDASVGSAPPTGSSDGHNILLMTDGYKFSHHKQYPVSWMPEHARPGSQSGEYFPAVLFPPTSKAPGAKLLQLATVPGGGSDSLVLITNASTAVVKVLGPAEADAAADINYACAAVEYAGPLKAGACREEGRGEEERRRRRLRPPPGRDKEGAGDHIVFFGLQYFIKEYLAEEFIARYMADVRIAGPAFAGGWDRTMFPRGDWEAMASGDYECTGVPTPGAVPGALPIKIEALPEGSIVAPGVAFFKLTNTHPRFYWLPNFLETLLLARGMHAREHARTPPSLVWYPTTVATQAREFRKTIQAYSVLSQRVSQVDFLPGERDFTPENIAADDLPVHIAQVFDLLDFGYRGVSSHETAGLGSGAYYTAGFEGSDTVAGSRMLLRHYNAADPKLGGTPVESFRAMFEQLHCATSVPAAEHSTITSWADMSPGADPAKYEADEYAAFVNMIRQYMPSFAVSLVSDGFNIWNAVANLWPSEKVVEGGEAGGLSMRAIIRARLKAGQLTLVRPDSGEGVETLPQLLSLFHATLPEAWESGLSPLRPLFAPTDPRQAEYEAVCESIRKAKGLPAGDNPFRRFVGQQFRILQGDGVALDTVGDMCASILANGFCVNAVHFGSGGGLLQKLNRDSLSVAFKCCAMYVGGRMYAIGKDPIAGGKKSYPGNPPVLRGADGVLRNRGTYDSAGEPSGAMLEAQPMSYAEFCSGVEGDVLQPVFENGTVLVDTPWSSIVSRAKALAVRLAEASCGSKWMHCHPTKMAAMQAEPAFAALGLEKSAAKLGLTATLDSHALVAAIKEKHVCDKKAAETGGCRAYCREAAKKVLAAIAESDMAAAEKAMKGKIMLTL

SEQ ID NO: 297 - DNA, 1380 bp, Hahella chejuensis
atgaaaaacagcattatcttaaacgtagattcttacaaaacctctcactacctgcagtatccggctggcgccacgcaggtttccagctacatcgaatcacggggcggcgcttttgagaaagcggtgttcttcggtctgcagatgttcatcaaagagtacctgaccaaaccgattaccgcggacgatatcgaagaagccaagctggtttatcaagcccacggcgtgcccttcaatgaagaaggctggcgctatattctggagaagcacgagggttatctgccgatagaaatccaggctgcgccggaaggaaccgtcatggatgtgaaaaacgtgatggtgcaggtcatcaacaccgaccgtaattgcgcctggttgaccagctatgtggaaacggcgttgttgagagcggtctggtatccgactacggtcgccaccgtatcctggagctgccgcaacatcatcaagcgttacctggaagaaacggcggacactatcgaaggattgccattcaaactgcacgacttcggcgctcgcggcgccagttctgaagaaaccgcagcgattggcggggccgctcacttggtgaactttatgggcactgacactgttagcggcatcatggcggcgagacgctactacggcgctgatatggcgggcttttcaatcccagcagcggagcacagcaccattaccagctggggcaaggaagcggaagtggacgcctacgccaacatgctggaccagttcgccgagcccggcaaactggtggcggtggtcagcgactcttatgacttgtggaacgctatcgacaacctctggggcgaagcgctgaaaaccaaaatcgagcgcagcggcggcaccttggtggtgcgtcctgacagtggcgatcctgtagcgatcgtgaccgaaaccatcgaacgactgatgcggaaattcggcttcaccgtcaacagcaaaggatatcgggtattgccggcgtgcatccgggtgattcaaggcgacggcatctctttgcacacgatcgaagccattctggcggcgatgaaagcgcgcaagcaaagcgctgaaaacattgctttcggcatggggggagaactgctgcagaaggtgaaccgggatacgttgaaattcgccatgaaggcttctgcgatatgcgtaaaaggcatctggagagatgtctataaagaccccatcaccgatcagggcaaacgttccaagaaaggacttctggcgctggttaaagacttggatggcggctttcagacagtgcgccggcaggacctgggtaatcgggaggaccaattggttaccgtcttccgtaatggcgatctgatgaaggaatggactttcgatgaagtcagagccaacgcggcgcaataa

SEQ ID NO: 298 - protein, 459 aa, Hahella chejuensis
MKNSIILNVDSYKTSHYLQYPAGATQVSSYIESRGGAFEKAVFFGLQMFIKEYLTKPITADDIEEAKLVYQAHGVPFNEEGWRYILEKHEGYLPIEIQAAPEGTVMDVKNVMVQVINTDRNCAWLTSYVETALLRAVWYPTTVATVSWSCRNIIKRYLEETADTIEGLPFKLHDFGARGASSEETAAIGGAAHLVNFMGTDTVSGIMAARRYYGADMAGFSIPAAEHSTITSWGKEAEVDAYANMLDQFAEPGKLVAVVSDSYDLWNAIDNLWGEALKTKIERSGGTLVVRPDSGDPVAIVTETIERLMRKFGFTVNSKGYRVLPACIRVIQGDGISLHTIEAILAAMKARKQSAENIAFGMGGELLQKVNRDTLKFAMKASAICVKGIWRDVYKDPITDQGKRSKKGLLALVKDLDGGFQTVRRQDLGNREDQLVTVFRNGDLMKEWTFDEVRANAAQ

SEQ ID NO: 299 - DNA, 1407 bp, Magnetospirillum magneticum
atgaggggcggtctcaatcccatcctggcggtggacagctacaaggccagccacaagtggcaatacccgccggggacggaatacgtgtcctcctatgtggaggcgcgggccgacaacagtggcctggaccttcccggcactctggtgttcggcctccagcccctgctgcgcaccctggccgcccatccggtgggtgaggcggatatcgtgcgggcggcgcgcctgttcgcggcccatggcgttcccttccacgaggaagggtggcgccacatcctgagccgccatggcgggcggcttcccgtggagatccgggcggtagccgaggggacgctggtgccgttctccaacgtggtggcccaggtggtcaacaccgatccccaggcattctggctgacctcctatctggagaccatgctgcagcgggccctgtggtatccctcgacggtggccaccgtctcctgggcggtgaagcggatcttgcgggaattctggctgctgacatcggacgatgccgagggcagcctggacttcaagctgcacgatttcggggcgcgcggcgcatcctcgggggaaagcgccgccctgggcggattggcccatctggtcaacttcaagggcaccgacaccgtcgaggcgctgctggccgccgaggagcattacgccgagcccatggccggctattccattcccgccgccgaacactccaccatcactagctgggggcggcagggcgaggtcgacgcctatgccaacatgctcgagcagttcggcgggccggggcgtctggtggcggtggtgtcggattcctacgacgtgtttcacgccgtcgagaacctttgggggcgggaattgcgcgcccaggtgctggacatgggcggaaccctggtgatccgccccgattccggcgatccggtggatgtggtgtcccaggtgctgcgcctggccgccgccgccttcggctcgacccgaaattccaagggctttcgcatcctcaatccggcagtccgggtcatccagggcgatggggtcaatcccaaatccattcgggccatcctcgcccgcatggtcgaggatggcttcgccatcgacaatattgccttcggcatgggtggcgcgctgctgcagaaagtggaccgcgacaccttttcgtgggccatgaaggcttcggcggtgcgggtggccggccagtggcgcgacgtctacaaggaaccggtgaccgatggcggcaagggctccaagcggggccgtctggccctggtccgcgatccggcggaaggcctgcgcaccgtaaggctcgaggattgtccggcgggggaagaccttctccgcccggtcttccgcgacggaaccctgctggtcgaggacagtctggcccaggtgcgccaccgggcctatttcggcaggtag

SEQ ID NO: 300 - protein, 468 aa, Magnetospirillum magneticum
MRGGLNPILAVDSYKASHKWQYPPGTEYVSSYVEARADNSGLDLPGTLVFGLQPLLRTLAAHPVGEADIVRAARLFAAHGVPFHEEGWRHILSRHGGRLPVEIRAVAEGTLVPFSNVVAQVVNTDPQAFWLTSYLETMLQRALWYPSTVATVSWAVKRILREFWLLTSDDAEGSLDFKLHDFGARGASSGESAALGGLAHLVNFKGTDTVEALLAAEEHYAEPMAGYSIPAAEHSTITSWGRQGEVDAYANMLEQFGGPGRLVAVVSDSYDVFHAVENLWGRELRAQVLDMGGTLVIRPDSGDPVDVVSQVLRLAAAAFGSTRNSKGFRILNPAVRVIQGDGVNPKSIRAILARMVEDGFAIDNIAFGMGGALLQKVDRDTFSWAMKASAVRVAGQWRDVYKEPVTDGGKGSKRGRLALVRDPAEGLRTVRLEDCPAGEDLLRPVFRDGTLLVEDSLAQVRHRAYFGR

SEQ ID NO: 301 - DNA, 1389 bp, Pasteurella multocida
atgtatacttctaattttcttaatcttatcttgaatacagatagctataaagcctctcattggctccaatatcctcctaatacagaatatatttcttactatattgaagcgcgtggaggaaactttgatgtgcttgcgtttggtttacaagcatttattaaagaatatttacttaaacctatctcgcaaaatgatattgatgaagcagaagttgttttgacggcacacggcttgccatttaatcgtcaaggttggcaacgtttattggagaaacatcaaggtttattaccaatcaaaatcgaagcagtaccagaaggcactgtgttacctactggaaatgtggtttgtcaaatcgttaatactgatcctgagtttttttggttagttggctatttagaaaccgcgttattgcgtgcgatttggtatccttctacggtggcgagtgtgtcatatttctgtaaacaaaaaattaaaacggcattagaaaaatcgtcagataatttagcaggactcggttttaaattacacgattttggtgctcgtggtgcatcaagtttagaaactgtggcattaggtggtttagcacacttagtgaattttatgggaaccgacagtgtgtctgcgcttgtcgcagcaaagcgttggtataacacgactagcatgcctgcgttttcgattcctgcggcggaacatagcacgatgacgtcttggggaaaagatagagaggcggatgcttatcgtaatatggttgagcaatttgcaggtgaacataaaatatatgcagtcgtgtcagatagttatgacctttggaatgctttagaaaatatttggggcacgcaactaaaagatctggtggagataaaaggaggcactttagtggttcgccctgatagtggagatcctgctgaagtggtttgtcgcactttagcgatcttggctgagaaatttggtacgactttaaatagtaaaggttataaagtcttgcctgattgtgtgcgccttattcaaggcgatggtattaatgtgaattctttaggtaaaattttggaggcaattcttgccagcggttttagtgttgagaatgtcgcctttggtatgggaggcggattattgcagcaagtgaatcgagacacaatgagttgggcaatgaaggccagtgcagtgtgtattgcaggcgaatggcatgatgtgtataaagacccgattactagccaagcaaagcgctcgaaaagaggcgtgcttgccttagtgaaacaagagaaccggtggcacacgattgaacaaaaggcgcttggacagcaaaagaaccagctccgcacagtgtttctgaatggagaattactgattgatgaacattttgatgatattcggaggagagcgggtttctaa

SEQ ID NO: 302 - protein, 462 aa, Pasteurella multocida
MYTSNFLNLILNTDSYKASHWLQYPPNTEYISYYIEARGGNFDVLAFGLQAFIKEYLLKPISQNDIDEAEVVLTAHGLPFNRQGWQRLLEKHQGLLPIKIEAVPEGTVLPTGNVVCQIVNTDPEFFWLVGYLETALLRAIWYPSTVASVSYFCKQKIKTALEKSSDNLAGLGFKLHDFGARGASSLETVALGGLAHLVNFMGTDSVSALVAAKRWYNTTSMPAFSIPAAEHSTMTSWGKDREADAYRNMVEQFAGEHKIYAVVSDSYDLWNALENIWGTQLKDLVEIKGGTLVVRPDSGDPAEVVCRTLAILAEKFGTTLNSKGYKVLPDCVRLIQGDGINVNSLGKILEAILASGFSVENVAFGMGGGLLQQVNRDTMSWAMKASAVCIAGEWHDVYKDPITSQAKRSKRGVLALVKQENRWHTIEQKALGQQKNQLRTVFLNGELLIDEHFDDIRRRAGF

SEQ ID NO: 303 - DNA, 1398 bp, Psychrobacter sp.
atgtttaccgcaaattttaataatttgattttaaattctgacagttataagacctcacactggctacaatatccacctggtagtgagtatatgtcaagctatgtcgaggcgcgtaaaggcgactatgatgtggtgttttttggtctacaagcttttataaaagaataccttaataagccgattaccacagcggatatcgatgacgctgagctggtgattaaagcgcatggcctgccttttaatcgcagcggctgggagcgcctagtcgaaaaacataacggctacttacccattcgtattcaagcagtgcccgaaggcagcttggttcctgtatctaatgtggtgtgccaaatcattaataccgatcctgagttttattggctgccaagctatcttgagaccagcttgcttagggccatttggtacccctcgactgtggccagcttatcgtattactgcaaaaatattattaaagctgccctagaaaaatctgcagatagcagcgcaggcttgccctttaagctgcatgattttggtgctcgcggagcttctagcatggagtctgtggcattaggtagccttgcacatttggttaatttctcaggtactgacagtatgacggcactggttgctgcaagccgctggtatggcatgagcgataacatgccagccttctcaatcccagccgctgagcacagtactatgaccgcctggggccgtgagcgtgagactcaggcctatgccaatatgctcgatcaattcggcggtgaaggtcacatggtcgctgtggtgtctgacagctataacttatggaatgccattgataatatttggggtgatgcgcttaaacagcaggtagaaaccatgggaggcaccttagtggtccgtccagacagtggtgatccagccaaagtcgtgcgagaggcactcgagcgcttatcggtcaaatttggataccgtgttaatagtaaaggctacaaggttttgccagactatgtacgcctaattcaaggtgatggcattagtccgcagagtctaggtaaaattttagacaccattatgcaagcaggctttagtgccgataatgtcacctttggcatgggcggcggcttattacaacaagtcaaccgcgataccatgagctgggcaatgaaggccagtgccattcgcatcgatggtgagttgaaagatatctttaaagaccccatcactagccgctcaaagcgctcgaaaaaaggccgcttggcattaattaagcagaccaatggcacgctcaccaccattaaagaggacagcttaaactcccccgaagacaacttactacgcgatgtctttgtcgatggtaagctgttagtcgatgataatctaaccaccatccgtcaacgtactggctggtag

SEQ ID NO: 304 - protein, 465 aa, Psychrobacter sp.
MFTANFNNLILNSDSYKTSHWLQYPPGSEYMSSYVEARKGDYDVVFFGLQAFIKEYLNKPITTADIDDAELVIKAHGLPFNRSGWERLVEKHNGYLPIRIQAVPEGSLVPVSNVVCQIINTDPEFYWLPSYLETSLLRAIWYPSTVASLSYYCKNIIKAALEKSADSSAGLPFKLHDFGARGASSMESVALGSLAHLVNFSGTDSMTALVAASRWYGMSDNMPAFSIPAAEHSTMTAWGRERETQAYANMLDQFGGEGHMVAVVSDSYNLWNAIDNIWGDALKQQVETMGGTLVVRPDSGDPAKVVREALERLSVKFGYRVNSKGYKVLPDYVRLIQGDGISPQSLGKILDTIMQAGFSADNVTFGMGGGLLQQVNRDTMSWAMKASAIRIDGELKDIFKDPITSRSKRSKKGRLALIKQTNGTLTTIKEDSLNSPEDNLLRDVFVDGKLLVDDNLTTIRQRTGW

SEQ ID NO: 305 - DNA, 1452 bp, Ralstonia solanacearum
atgcaaaacgatctgcccggcctgtcggccatcctgtccaatccgatcctcaatacggattcgtacaaggcttcccactacctgcagtatccggccggcacgtcggccatgttttcctacgtcgagtcgcgcggcggccgctatgaccgcaccgtgttcttcgggctacagatgctggcgaaggaatacctgtgccgccccatcacgccggccatgatcgacgcggcgcgcgggttcttcgccgcgcacggcgagccgttcaacgaagccggctggcgctacatcgtcgcacgctacgacggctacctgccggtgcgcatccgcgcggtgccggagggcagcgtggtgcccaaccacaatgtgctgatgacggtcgagtgcgacgaccccgaggtgttctggctcgcgtcgtatctcgagacgatgctgctgcgcgtgtggtatccgatcacggtggcgacgcagagctggcacctgcgccaactggtgcaccgctacctggagcagaccagcgacgaccccggccagttgccgttcaaggtgcacgacttcggcgcgcgcggcgtgtcgagcgcggagtcgtcggccatcggcggggcggcgcacctggtcagcttcatggggtcggacaccgtgctgggcgtggcggcggccaatctgtactacaacgcgcagatggccgccttctcggtgccggccgccgagcacagcaccatcaccgcgtggggcagggcgggcgaggccgacgcctaccgcaacatgctgcgccagttcggcaagccgggcgcgatcgtctcggtggtgtccgattcgtacgatctgttcgccgcgctgcgcctgtggggcggcgagctgcggcaggcggtgatcgattccggcgccacgctggtggtgcgccccgattcgggcgatccgcgcagcatcgtgctgcagacggtgcgcgcgctcgatgcgtcgttcggggccaccgtcaacggcaagggctaccgcgtgctcaaccatgtgcgcgtgatccagggcgacggcatcaacgccgcgtcgatcgaggcgatcctggccgagctggaggccgcgggctatgcggcggacaacatcgtcttcggcatggggggtgccctgctgcagcagctcaaccgcgatacccagcgcttcgccatgaagtgctcggcggtgcgggtggacggcgcctggcgcgaggtctgcaaggacccggtcaccgatgccggcaagcgctcgaagaagggccgcctgaccttgctgcgcaaccgcgtgtccggcgagtacgcgacggccacgctgccgctcgcctgggacgaccgccggatcgaaggggaatgggaggacgccctggtgacggtgttcgaaaacggccgcctgttgcaggacgtgtcgctggacgccgtgcgggcacgcgcccaggcacacgagctggcgccggcgctcgtcgactga

SEQ ID NO: 306 - protein, 483 aa, Ralstonia solanacearum
MQNDLPGLSAILSNPILNTDSYKASHYLQYPAGTSAMFSYVESRGGRYDRTVFFGLQMLAKEYLCRPITPAMIDAARGFFAAHGEPFNEAGWRYIVARYDGYLPVRIRAVPEGSVVPNHNVLMTVECDDPEVFWLASYLETMLLRVWYPITVATQSWHLRQLVHRYLEQTSDDPGQLPFKVHDFGARGVSSAESSAIGGAAHLVSFMGSDTVLGVAAANLYYNAQMAAFSVPAAEHSTITAWGRAGEADAYRNMLRQFGKPGAIVSVVSDSYDLFAALRLWGGELRQAVIDSGATLVVRPDSGDPRSIVLQTVRALDASFGATVNGKGYRVLNHVRVIQGDGINAASIEAILAELEAAGYAADNIVFGMGGALLQQLNRDTQRFAMKCSAVRVDGAWREVCKDPVTDAGKRSKKGRLTLLRNRVSGEYATATLPLAWDDRRIEGEWEDALVTVFENGRLLQDVSLDAVRARAQAHELAPALVD

SEQ ID NO: 307 - DNA, 1410 bp, Stenotrophomonas maltophilia
atgcactacctcgataatcttctcctcaacaccgacagctacaaggccagccattggctgcagtatccgccgggtaccgatgccacgttcttctacgtcgaatcacgtggcggcctgcacgatcgcacggtgttcttcggcctgcaggcgatcctcaaggacgcgctggcacgaccggtcacccacgccgacatcgacgacgctgctgcggtattcgccgcgcacggcgaaccgttcaacgaggccggctggcgcgatatcgtcgaccggcttggcggccacctgccggtgcgcatccgcgccgttcccgagggcagcgtggtgcccacccaccaggcactgatgaccatcgagtcgaccgatccggctgcgttctgggtgccgtcgtatctggaaacgctgctgctgcgcgtgtggtatccggtcaccgtggccaccatcagctggcacgcacggcagaccatcgccgcgttcctgcagcagaccagcgacgacccgcaggggcagctgccgttcaagctgcacgacttcggcgcgcgcggtgtatcgagcctggaatcggccgcgttgggcggtgccgcgcacctggtcaacttcctcggcaccgataccgtgtcggcgctgtgcctggcacgcgcgcactaccacgcgccgatggccggctattcgattccggccgccgagcacagcaccatcaccagttggggccgcgaacgcgaggtggacgcctatcgcaacatgctgcgccagttcggcaagcccggttcgatcgtggcggtggtgtcggacagctatgacatctaccgcgcgatcagcgaacactggggcaccaccctgcgcgatgacgtgatcgcgtcgggcgccaccctggtcatccgtcccgactcgggtgacccggtggaggtggtggccgaaagcctgcgccggctggatgaagccttcggccacgcgatcaacggcaagggctatcgcgtgctcaaccacgtgcgggtgatccagggcgatggcatcaatccggacaccatccgcgcgatcctgcagcgcatcaccgacgacggctacgccgccgacaacgtggccttcggcatgggcggtgcgctgctgcagcggctggaccgcgatacgcagaagttcgcactgaagtgctcggcggcgagggtcgagggtgagtggatcgacgtctacaaggatccggtcaccgacgccggcaaggccagcaagcgcggccgcatgcgcctgctgcgccgcctggacgatggcagcctgcatacggtgccactgccggccaacggcgacgacaccctgccggacggcttcgaggacgcaatggtgaccgtgtgggagaacggccatcttctgtacgaccagcggctggacgacatccgcacgcgggcggccgtggggcattga

SEQ ID NO: 308 - protein, 469 aa, Stenotrophomonas maltophilia
MHYLDNLLLNTDSYKASHWLQYPPGTDATFFYVESRGGLHDRTVFFGLQAILKDALARPVTHADIDDAAAVFAAHGEPFNEAGWRDIVDRLGGHLPVRIRAVPEGSVVPTHQALMTIESTDPAAFWVPSYLETLLLRVWYPVTVATISWHARQTIAAFLQQTSDDPQGQLPFKLHDFGARGVSSLESAALGGAAHLVNFLGTDTVSALCLARAHYHAPMAGYSIPAAEHSTITSWGREREVDAYRNMLRQFGKPGSIVAVVSDSYDIYRAISEHWGTTLRDDVIASGATLVIRPDSGDPVEVVAESLRRLDEAFGHAINGKGYRVLNHVRVIQGDGINPDTIRAILQRITDDGYAADNVAFGMGGALLQRLDRDTQKFALKCSAARVEGEWIDVYKDPVTDAGKASKRGRMRLLRRLDDGSLHTVPLPANGDDTLPDGFEDAMVTVWENGHLLYDQRLDDIRTRAAVGH

SEQ ID NO: 309 - DNA, 1389 bp, Synechococcus elongatus
atggacctcaatcttctgttcgataccgactcatacaaagtcagccactggctgcaatatcctgccgatacgactgcgatcggagcttatttagaaagccggggtggagattgctcgcacacgctcttttttggcttgcaatatctactactgcgttatttcttccagccaatcactagcgctgacattcaagaagccgccgcgctgtttcaagcgcatgggctgcctttcaatcaagcgggctggcaacgagtttgcgatcgctatggcgggtatttacctttacgaattcgggctgtcccggaaggtagccttgtccccaccggcaatatcttgctgacagtggaatcgaccgatcctgaattggcttggctggccacttgggttgagacactactgctgcgggtttggtatccgataactgtggctacacgcagttggcagcttcggcaaatcattcagcaagcgctggagcaatcagccgaaaatccagcagctgaaattgacttcaaactgcatgactttggatcacgcggggtatcgagccaagaaagtgctgcaatcggcgggctggctcatttggtcaactttcaaggcactgatacgatcgctgcgttactggcaggacagcgctattacgattgcgcgatcgctggcttttcgattccggcggcggagcattcaacgattacggcttggggcccatcgggtgagttagatgcttaccgcaatatgctcgatcgctttgcaaatccgggatctgtggtggctgttgtatcggactcctatgatctctggcatgccgtcgatcagctttggggtgaggatctccgcgatcgcattttgcaatcgggagcaaccgttgtcattcggcctgactcaggcaatcctgagcagattgtgccggaattactgcgtcgtttggccgctaagttcggctgcgatcgcaatcagaagggttatcaagttttgcgatcggtgcgggtgattcagggcgatgggatcacagtggacagtctgcccaaagttctgcaagcggttatggccgctggctttagtgccagtaatgtcgcttttggcatgggtggcgggctgttgcagcaggtcaatcgcgatacccaacgctttgcctacaagtgcagctggatcgagcgatcgggacaagtgattcccatttgcaagcgaccagccacggatctgcgcaaggctagcaaagcaggacgcttggatttaattcgcgatcgcgaggggcaataccgaacagtctcgttactgacgtcagagcctgacccgcaatcctgcctgcaaacggtgtttgaaaatggtgcgatcgtgcggcgacaaagcttgcaggaaatccgcgatcgcgctcgttctgagacacgctag

SEQ ID NO: 310 - protein, 462 aa, Synechococcus elongatus
MDLNLLFDTDSYKVSHWLQYPADTTAIGAYLESRGGDCSHTLFFGLQYLLLRYFFQPITSADIQEAAALFQAHGLPFNQAGWQRVCDRYGGYLPLRIRAVPEGSLVPTGNILLTVESTDPELAWLATWVETLLLRVWYPITVATRSWQLRQIIQQALEQSAENPAAEIDFKLHDFGSRGVSSQESAAIGGLAHLVNFQGTDTIAALLAGQRYYDCAIAGFSIPAAEHSTITAWGPSGELDAYRNMLDRFANPGSVVAVVSDSYDLWHAVDQLWGEDLRDRILQSGATVVIRPDSGNPEQIVPELLRRLAAKFGCDRNQKGYQVLRSVRVIQGDGITVDSLPKVLQAVMAAGFSASNVAFGMGGGLLQQVNRDTQRFAYKCSWIERSGQVIPICKRPATDLRKASKAGRLDLIRDREGQYRTVSLLTSEPDPQSCLQTVFENGAIVRRQSLQEIRDRARSETR

SEQ ID NO: 311 - DNA, 1542 bp, Volvox carteri
atgctgcctctgggagtgccaatcagtgtgctgagtgatagctacaaggctacgcactttctgcagtacccaaaggcgcataagatggttgcgtatggtgagtttcgccaggggttcaataaagacaaggcagacacgcgcatggtgtcatacggcatccgttacctggttgagaattatgttgcgaagccctggacaatggaggacgtcgagatggctgaggcgttctacagtcgagagggcgacctaaccttaccagctgcgccccctcagacgcccttctcctcagccacacgtgattacccgccgccacgtcctgtgtgccgagcaggttacttccctgtgaagctggaggcgctgcccgagggcacttgcatccacgcccgcgtcccggtgtaccagatcaccgccaccggcgagtacagtcccctctgcacctttttggagacgttgctgaccatgatctggtaccccaccaccgtggcgaccctgtcacggaaggcgcgggatgtggtagaggtgtccttcggacgcaccagcgacggcggccccaccagcaggctggtggagagcaggctggtggatttcgggtttcggggctgcacgtccgtggagcagtccatcattggcggctgtgcgcacctcctcagcttcaactcctcggataccatgtccgcagcgttttatgcacagttcaagctgaatggtgggcgacccgtgggtcagtccattcccgccacggagcacagcgtcatgacgtcatggcccactgaagcggctgcgatgaccaacatgattgacaactttggcactgggatatacgcttgcgtcatggacagctacgactattgcaaggctctgtccgaggtccttccttccgtggccgcacacaaggtgtcgcgaggggggtacctggtgctgagacctgacagcggcgaccccacggaggccgtgctgatggccctaaacgccgctgacaaggtgttcggcagtgtccgcaacagcaagggcttccgggtcatccagggctgtggggtaattcagggggacggtatcgacctgacgactatggagaagatatcggtggctatcgaagaggctggctttgcggctgacaatgtgtcgtacggcatgggcggcggcctgctccaaaaggtcaaccgggacaccatgtccttcgccaccaagctgtgtcacatcgtgtatgaggacggccggcccgcggacatcatgaagcagccgcagacggacacgggcaaattctcccttcctggtatcctggcagtcaaacgagtgaatggcgtccccacggttttccccgccgacacggccgaagttgcaccccatgagaacttgctgcgggttgtgtacgacaaaggcccgttggagggggtgtgggacgactttgacacggtgcgcgcgcgcgtggcggcggagtggatggcattgcctcgcagcgccgacaacatcagcagttcgttgagggagaaagtgcggcaacagatggcgctgaggggcaaggtgccggcaatcgcgcgctga

SEQ ID NO: 312 - protein, 513 aa, Volvox carteri
MLPLGVPISVLSDSYKATHFLQYPKAHKMVAYGEFRQGFNKDKADTRMVSYGIRYLVENYVAKPWTMEDVEMAEAFYSREGDLTLPAAPPQTPFSSATRDYPPPRPVCRAGYFPVKLEALPEGTCIHARVPVYQITATGEYSPLCTFLETLLTMIWYPTTVATLSRKARDVVEVSFGRTSDGGPTSRLVESRLVDFGFRGCTSVEQSIIGGCAHLLSFNSSDTMSAAFYAQFKLNGGRPVGQSIPATEHSVMTSWPTEAAAMTNMIDNFGTGIYACVMDSYDYCKALSEVLPSVAAHKVSRGGYLVLRPDSGDPTEAVLMALNAADKVFGSVRNSKGFRVIQGCGVIQGDGIDLTTMEKISVAIEEAGFAADNVSYGMGGGLLQKVNRDTMSFATKLCHIVYEDGRPADIMKQPQTDTGKFSLPGILAVKRVNGVPTVFPADTAEVAPHENLLRVVYDKGPLEGVWDDFDTVRARVAAEWMALPRSADNISSSLREKVRQQMALRGKVPAIAR

SEQ ID NO: 313 - DNA, 1464 bp, Xanthomonas campestris
atgacctcccgctggcggacagaccgccggccctcccgacgcgaaggagcttccgtcatgcattatctcgacaacctgctgctcaacaccgacagctacaaggccagccactggctgcaatatccgcctggcaccgatgcctcgtttttctacgtggaatcgcgcggcggcgtgtacgaccagaccgtgttcttcggcctgcagtcgatcctgaaagaagcgatcaaccgcccggtgacgcacgccgacatcgacgatgccaaggcgttgctggcggcgcatggcgagccgttcaacgaggccggctggcgcgatatcgtcgaccgcttgggtgggcagttgccgatccgcatccgtgcggtgcccgaaggctgcgtggtgcccacgcacaacgtgctgatgacgatcgaatccaccgacgccaaggcgttctgggtgccgtcgtatctggaaaccttgctgctgcgcgtgtggtatccggtgaccgtggccacggtgagctggcaggtgaagcagatcgtgcgcgatttcctgcaacgcaccagcgacgatcccgaaggccagttgccgttcaagctgcatgacttcggtgcgcgtggcgtgtccagcctgggctcggccgcgctgggtggcgcggcgcacctggtgaacttcctcggcaccgatactttatcggcgttgttgctggcgcgcgcgcattaccacacgccggtggccggttattcgatccccgcggccgagcacagcaccatcaccagctgggggcgcgagcgcgaagtcgatgcataccgcaacatgctcacgcagtttgcgcggccgggcgcgatcgtggcggtggtgtcggacagctacgacatctaccgcgccattcgcgagcattggggcaccacgctgcgcgaggagatcatcgcctccggtgccaccgtggtgatccgccccgattcgggcgacccggtggatgtggtcgagcagtgtctgttgttgctggacgaggcgttcggccatcaggtcaacggcaagggctacaaggtgctcaatcacgtgcgcgtgatccagggcgatggcatcaatccgcagtcgctgcgcgccatcctcgaacgcatcaccgctgccggatatgcggccgacaatgtcgccttcggcatgggcggtgcgctgctgcagaaggtggaccgcgacacgcagaagttcgcactgaagtgctcggcggtgcgcgtggatggcgcatggatcgatgtctacaaggacccgatcaccgatcagggcaagcagagcaagcgcggccggctgacgctgctgcgcgaccgtaccacgggccaataccgcagtgccttgctcgacgaggtcgccacgcacgcgggcgacagtgacgatgcattggtcacggtgtgggagaacggcaagatgctgcaggaatggacgcttgagcaggtgcgtgcacatgcagacgctgcccggttgtga

SEQ ID NO: 314 - protein, 487 aa, Xanthomonas campestris
MTSRWRTDRRPSRREGASVMHYLDNLLLNTDSYKASHWLQYPPGTDASFFYVESRGGVYDQTVFFGLQSILKEAINRPVTHADIDDAKALLAAHGEPFNEAGWRDIVDRLGGQLPIRIRAVPEGCVVPTHNVLMTIESTDAKAFWVPSYLETLLLRVWYPVTVATVSWQVKQIVRDFLQRTSDDPEGQLPFKLHDFGARGVSSLGSAALGGAAHLVNFLGTDTLSALLLARAHYHTPVAGYSIPAAEHSTITSWGREREVDAYRNMLTQFARPGAIVAVVSDSYDIYRAIREHWGTTLREEIIASGATVVIRPDSGDPVDVVEQCLLLLDEAFGHQVNGKGYKVLNHVRVIQGDGINPQSLRAILERITAAGYAADNVAFGMGGALLQKVDRDTQKFALKCSAVRVDGAWIDVYKDPITDQGKQSKRGRLTLLRDRTTGQYRSALLDEVATHAGDSDDALVTVWENGKMLQEWTLEQVRAHADAARL

SEQ ID NO: 315 - protein, 242 aa, Artificial sequence
  conserved domain
FKLHDFGARGVSSGESSGIGGLAHLVNFQGSDTVKALVYGQQYYNCPMAAYSIPAAEHSTITAWGREGEVLAYENMLTQFAKPGSVLAVVSDSYDLWNAIDHLWGDHLRAQVLDSGATVVIRPDSGDPVAIVAQTLERLEACFGSTLNSKGFRVLNAVRVIQGDGVDEESISAILEKTESLGFSTTNLAFGMGGALLQKVNRDTQKFAMKCSEVTVEDKAIPVYKDPVTDPGKTSKKGRLSL

SEQ ID NO: 316 - DNA, 60 bp, Artificial sequence
  primer: prm14234
ggggacaagtttgtacaaaaaagcaggcttaaacaatgaatactaatctcattctggatg

SEQ ID NO: 317 - DNA, 47 bp, Artificial sequence
  primer: prm14233
ggggaccactttgtacaagaaagctgggtctagcttgcgggaacatt

SEQ ID NO: 318 - protein, 34 aa, Artificial sequence
  motif 7
FKLHDFGARGVSSGESSGIGGLAHLVNFQGSDTV

SEQ ID NO: 319 - protein, 17 aa, Artificial sequence
  motif 8
AAYSIPAAEHSTITAWG

SEQ ID NO: 320 - protein, 9 aa, Artificial sequence
  motif 9
AVVSDSYDL

SEQ ID NO: 321 - protein, 9 aa, Artificial sequence
  motif 10
VIRPDSGDP

SEQ ID NO: 322 - protein, 9 aa, Artificial sequence
  motif 11
VRVIQGDGV

SEQ ID NO: 323 - protein, 18 aa, Artificial sequence
  motif 12
NLAFGMGGALLQKVNRDT

SEQ ID NO: 324 - DNA, 2194 bp, Oryza sativa; identical to SEQ ID NO: 201

SEQ ID NO: 325 - DNA, 1389 bp, Synechococcus elongatus; identical to SEQ ID NO: 309

SEQ ID NO: 326 - protein, 462 aa, Synechococcus elongatus; identical to SEQ ID NO: 310

SEQ ID NO: 327 - DNA, 4175 bp, Artificial sequence
  expression cassette pGOS2::NMPRT::terminator
aatccgaaaagtttctgcaccgttttcaccccctaactaacaatatagggaacgtgtgctaaatataaaatgagaccttatatatgtagcgctgataactagaactatgcaagaaaaactcatccacctactttagtggcaatcgggctaaataaaaaagagtcgctacactagtttcgttttccttagtaattaagtgggaaaatgaaatcattattgcttagaatatacgttcacatctctgtcatgaagttaaattattcgaggtagccataattgtcatcaaactcttcttgaataaaaaaatctttctagctgaactcaatgggtaaagagagagattttttttaaaaaaatagaatgaagatattctgaacgtattggcaaagatttaaacatataattatataattttatagtttgtgcattcgtcatatcgcacatcattaaggacatgtcttactccatcccaatttttatttagtaattaaagacaattgacttatttttattatttatcttttttcgattagatgcaaggtacttacgcacacactttgtgctcatgtgcatgtgtgagtgcacctcctcaatacacgttcaactagcaacacatctctaatatcactcgcctatttaatacatttaggtagcaatatctgaattcaagcactccaccatcaccagaccacttttaataatatctaaaatacaaaaaataattttacagaatagcatgaaaagtatgaaacgaactatttaggtttttcacatacaaaaaaaaaaagaattttgctcgtgcgcgagcgccaatctcccatattgggcacacaggcaacaacagagtggctgcccacagaacaacccacaaaaaacgatgatctaacggaggacagcaagtccgcaacaaccttttaacagcaggctttgcggccaggagagaggaggagaggcaaagaaaaccaagcatcctcctcctcccatctataaattcctccccccttttcccctctctatataggaggcatccaagccaagaagagggagagcaccaaggacacgcgactagcagaagccgagcgaccgccttcttcgatccatatcttccggtcgagttcttggtcgatctcttccctcctccacctcctcctcacagggtatgtgcccttcggttgttcttggatttattgttctaggttgtgtagtacgggcgttgatgttaggaaaggggatctgtatctgtgatgattcctgttcttggatttgggatagaggggttcttgatgttgcatgttatcggttcggtttgattagtagtatggttttcaatcgtctggagagctctatggaaatgaaatggtttagggtacggaatcttgcgattttgtgagtaccttttgtttgaggtaaaatcagagcaccggtgattttgcttggtgtaataaaagtacggttgtttggtcctcgattctggtagtgatgcttctcgatttgacgaagctatcctttgtttattccctattgaacaaaaataatccaactttgaagacggtcccgttgatgagattgaatgattgattcttaagcctgtccaaaatttcgcagctggcttgtttagatacagtagtccccatcacgaaattcatggaaacagttataatcctcaggaacaggggattccctgttcttccgatttgctttagtcccagaattttttttcccaaatatcttaaaaagtcactttctggttcagttcaatgaattgattgctacaaataatgcttttatagcgttatcctagctgtagttcagttaataggtaatacccctatagtttagtcaggagaagaacttatccgatttctgatctccatttttaattatatgaaatgaactgtagcataagcagtattcatttggattattttttttattagctctcaccccttcattattctgagctgaaagtctggcatgaactgtcctcaattttgttttcaaattcacatcgattatctatgcattatcctcttgtatctacctgtagaagtttctttttggttattccttgactgcttgattacagaaagaaatttatgaagctgtaatcgggatagttatactgcttgttcttatgattcatttcctttgtgcagttcttggtgtagcttgccactttcaccagcaaagttcatttaaatcaactagggatatcacaagtttgtacaaaaaagcaggcttaaacaatgaatactaatctcattctggatgtggactcctataaagtgagccactggttgcagtatcctcctgacacaacggcaatgtattcctatgtggaaagtcgtgggggaaggtatcctgtcactgtcttttttggtctccaatacattttaaagcggtatctgactcaatccattgaaccctggatggtggaggaagctaatcgccttttgacagcccatggcttacctttcaactatggcggttggcgatacattgcggaggatttgcagggtcgtttacctgtacgtattaaggcggttccagagggctcggtcatcccggttcataatgttttgatgacagtggaatccacggacccaaaggttttttggttagtttcctggttagaaactttgttgatgcgggtttggtatcccattacggtggcaacccagagttggcatttaaaacaacgcatctatcaatccctatgccgtactgcggatgatcctgatggtgaaatcaattttaaactccacgattttggggcccggggggtttctagtggtgaatcgtccggcattggcggactggctcacttagttaatttccaaggttctgacacagtaaaggccctggtgtatgggcagcaatattacaactgccccatggcggcctattcgattcccgccgcagaacattccaccattacagcttggggaagggaaggggaagttttggcctatgaaaatatgttgacccagtttgccaagccagggtcggtgttggcggtggtttccgattcctatgatctctggaatgccattgaccatctctggggcgatcacctaagggcacaggtgcttgattcgggggctacggtggttatccgtccggattcaggtgacccggtggccattgtggcccaaactttggaacggttggaggcttgttttggcagcaccctcaacagtaagggctttcgagttctaaatgctgtgcgggttatccaaggggatggggttgatgaagagagtatcagcgccattctagagaagactgagagccttggctttagtactactaatttagcttttggtatggggggagctttgttgcaaaaggtgaatcgggatacccaaaaatttgccatgaagtgcagtgaggtaacggtggaggacaaggcgatccctgtttataaagaccctgttactgatcctggtaaaactagcaaaaaggggcgattatccctggttaaaactgactctggttatggcactgtacccacttcttctgaggatttattgcaggttgtctatgaaaatggacatttactgcaagaccaatgcttggatgctattcgtcaacgagcctggccattaatcagggtcaatgttcccgcaagctagacccagctttcttgtacaaagtggtgatatcacaagcccgggcggtcttctagggataacagggtaattatatccctctagatcacaagcccgggcggtcttctacgatgattgagtaataatgtgtcacgcatcaccatgggtggcagtgtcagtgtgagcaatgacctgaatgaacaattgaaatgaaaagaaaaaaagtactccatctgttccaaattaaaattcattttaaccttttaataggtttatacaataattgatatatgttttctgtatatgtctaatttgttatcatccgggcggtcttctagggataacagggtaattatatccctctagacaacacacaacaaataagagaaaaaacaaataatattaatttgagaatgaacaaaaggaccatatcattcattaactcttctccatccatttccatttcacagttcgatagcgaaaaccgaataaaaaacacagtaaattacaagcacaacaaatggtacaagaaaaacagttttcccaatgccataatactcgaac

SEQ ID NO: 328 - DNA, 891 bp, Oryza sativa
atgagcaatgcttttttataatgccaactttgtacaaaaaagcaggctatggcagctgctatagaaggaaatctgatgcgggcgctgggagaggctccgtcgccgcagatgcagaagatcgcgccgccgccgtttcatcccggcttgccgccggcgccggcgaacttctcctcggccggagtccacgggttccactacatgggcccggcccagctcagcccggcccagatccagcgcgtccaggcccaactccacatgcagcggcaggcccagtcggggctcggcccgcgggcccagcccatgaagcccgcttcggcggctgctccggcggcggcggcggcgcgggcgcagaagctgtaccgcggcgtgcggcagcggcactggggcaagtgggtggcggagatccggctgccgcgcaaccgcaccaggctctggctcggcaccttcgacaccgccgaggaggcggcgctcacctacgaccaggccgcgtaccgcctccgcggcgacgcggcgcggctcaacttcccggacaacgccgcgtcgcggggcccgctcgacgccgccgtggacgccaagctccaggccatctgcgacaccatcgccgcgtccaagaacgcctcatccaggtccaggggcggcgccggcagggccatgcccatcaacgcgcccctggtcgccgcggcgtcgtcgtcctccggctccgaccactccggcggcggcgacgacggcggctcggagacgtcgtcgtcgtctgcggcggcgtcgccgctggcggagatggagcagctggacttcagcgaggtgccgtgggacgaggcggaggggttcgcgctcaccaagtacccgtcgtacgagatcgactgggactcgctgctcaacaacaataactag

SEQ ID NO: 329 - protein, 280 aa, Oryza sativa
MAAAIEGNLMRALGEAPSPQMQKIAPPPFHPGLPPAPANFSSAGVHGFHYMGPAQLSPAQIQRVQAQLHMQRQAQSGLGPRAQPMKPASAAAPAAAAARAQKLYRGVRQRHWGKWVAEIRLPRNRTRLWLGTFDTAEEAALTYDQAAYRLRGDAARLNFPDNAASRGPLDAAVDAKLQAICDTIAASKNASSRSRGGAGRAMPINAPLVAAASSSSGSDHSGGGDDGGSETSSSSAAASPLAEMEQLDFSEVPWDEAEGFALTKYPSYEIDWDSLLNNNN

SEQ ID NO: 330 - DNA, 1005 bp, Arabidopsis thaliana
atggcagctgctatgaatttgtacacttgtagcagatcgtttcaagactctggtggtgaactcatggacgcgcttgtaccttttatcaaaagcgtttccgattctccttcttcttcttctgcagcgtctgcgtctgcgtttcttcacccctctgcgttttctctccctcctctccccggttattacccggattcaacgttcttgacccaaccgttttcatacgggtcggatcttcaacaaaccgggtcattaatcggactcaacaacctctcttcttctcagatccaccagatccagtctcagatccatcatcctcttcctccgacgcatcacaacaacaacaactctttctcgaatcttctcagcccaaagccgttactgatgaagcaatctggagtcgctggatcttgtttcgcttacggttcaggtgttccttcgaagccgacgaagctttacagaggtgtgaggcaacgtcactggggaaaatgggtggctgagatccgtttgccgagaaatcggactcgtctctggcttgggacttttgacacggcggaggaagctgcgttggcctatgataaggcggcgtacaagctgcgcggcgatttcgcccggcttaacttccctaacctacgtcataacggatctcacatcggaggcgatttcggtgaatataaacctcttcactcctcagtcgacgctaagcttgaagctatttgtaaaagcatggcggagactcagaaacaggacaaatcgacgaaatcatcgaagaaacgtgagaagaaggtttcgtcgccagatctatcggagaaagtgaaggcggaggagaattcggtttcgatcggtggatctccaccggtgacggagtttgaagagtccaccgctggatcttcgccgttgtcggacttgacgttcgctgacccggaggagccgccgcagtggaacgagacgttctcgttggagaagtatccgtcgtacgagatcgattgggattcgattctagcttag

SEQ ID NO: 331 - protein, 334 aa, Arabidopsis thaliana
MAAAMNLYTCSRSFQDSGGELMDALVPFIKSVSDSPSSSSAASASAFLHPSAFSLPPLPGYYPDSTFLTQPFSYGSDLQQTGSLIGLNNLSSSQIHQIQSQIHHPLPPTHHNNNNSFSNLLSPKPLLMKQSGVAGSCFAYGSGVPSKPTKLYRGVRQRHWGKWVAEIRLPRNRTRLWLGTFDTAEEAALAYDKAAYKLRGDFARLNFPNLRHNGSHIGGDFGEYKPLHSSVDAKLEAICKSMAETQKQDKSTKSSKKREKKVSSPDLSEKVKAEENSVSIGGSPPVTEFEESTAGSSPLSDLTFADPEEPPQWNETFSLEKYPSYEIDWDSILA

SEQ ID NO: 332 - DNA, 987 bp, Brassica napus
atggaagctgctatgaatatgtacaatagcataacgtttcaacagccagattcgtttggtggtggtgaactcatggaagcgcttgtaccttatataaatagcgtttccaattcttctccttatcccgcgtctgcgtttattcaacccgcagcgtctgcgtttcctccttctctacctaccttccccgcttactacccggaagactattcaacgttcatgacccaaccgtttacttacgggtcggatcttcaccaaaccgggtcattaaccgggctcaaccacctcttttccagccaagctcatcctcttcctcccatgcaccatcagagccacaacaacaccttctcgaaccttctcagccctaagccgttactgatgaagcagaccggtgccaccggatcttgtttcgcctacggtgctccggccaagccgacgaagctgtacagaggcgtgaggcagcgtcactgggggaaatgggtggcggagatccgtttgccgaggaaccgtacccgtctctggcttgggacgttcgacacggcggaggaagctgcgttggcctacgacaaggcggcgtataagctgcgcggcgatttcgcccggcttaacttccctaacctgcgtcacaacgggtcccacatcggaggcgagttcggcgagtacaaaccgcttcactccaccgtcgacgccaagctcgaagctatatgtcagagcatggcggaggcggagaaacagggcaaaactacgacgaaagcatcgaagaaacgtgcctcgaagacggtttcatcgccggagaaagtcaaggcggaggataactcgaactcggtcgatgaatctacgccggtgacggagttcgttgagtccgccggttcttcgccgttgtcggacttaacgttcgccgacactgaggagccgccgcagtggaacgagacgttctcgttggagaagtatccgtcgtacgagatagattgggattcgatcctgtcttga

SEQ ID NO: 333 - protein, 328 aa, Brassica napus
MEAAMNMYNSITFQQPDSFGGGELMEALVPYINSVSNSSPYPASAFIQPAASAFPPSLPTFPAYYPEDYSTFMTQPFTYGSDLHQTGSLTGLNHLFSSQAHPLPPMHHQSHNNTFSNLLSPKPLLMKQTGATGSCFAYGAPAKPTKLYRGVRQRHWGKWVAEIRLPRNRTRLWLGTFDTAEEAALAYDKAAYKLRGDFARLNFPNLRHNGSHIGGEFGEYKPLHSTVDAKLEAICQSMAEAEKQGKTTTKASKKRASKTVSSPEKVKAEDNSNSVDESTPVTEFVESAGSSPLSDLTFADTEEPPQWNETFSLEKYPSYEIDWDSILS

SEQ ID NO: 334 - DNA, 933 bp, Brassica napus
atggaagctgctatgaatatgtacagtagcagaacggttcaccaatcagattcgtttggtggtggtgaactcatggaagcgcttgtaccttttatcaaaagcgtttccacctcttcttcttctcctcccgcgaccgcgtctgcgtttattaactccgcagcgtctgcgttctctcttcctactttccccggatatcacacggaacacttcatgacccaaccgtttacatacgggtcggatcttaaccaaaccgggtcatcattaatcgggctaaacaacctctcttcttcccaaatccaccagatccaatctcagatccaccacaaccatcctctcctcaggccaaagcctttactcatgaagcaaaccggagtcgccggatcttgtttcctggcgaagccgacgaagctgtacagaggcgtgaggcagcgtcactggggcaaatgggtggcggagatccgtttgccgaggaaccgtactcgtctctggctaggaacgttcgacacggcggaggaagcagccttggcttacgacaaggcggcgtttaagctgcgcggcgatcacgcccggcttaacttccctaacttacgtcacaacggttcccacatcggcggcgagttcggcgagtacaagcctcttcactcaacggtcgacgctaagctcgaagctatttgtcagagcatggcggagacgcagaaacaggacaaaacagcgaaagcttcgaagaaacgtgcctcgaaggtgaagaaaactgagaaggttgatttgtcggagaaagtcagtccggtgacggagttcgttgagtccgccgggtcttcgccgttgtcggagctgacgttcgctgacaccgaggagcagccgcggtggaacgagaccttctcgttggagaagtatccgtcttacgagatcgactgggattcgatactgtcgtga

SEQ ID NO: 335 - protein, 310 aa, Brassica napus
MEAAMNMYSSRTVHQSDSFGGGELMEALVPFIKSVSTSSSSPPATASAFINSAASAFSLPTFPGYHTEHFMTQPFTYGSDLNQTGSSLIGLNNLSSSQIHQIQSQIHHNHPLLRPKPLLMKQTGVAGSCFLAKPTKLYRGVRQRHWGKWVAEIRLPRNRTRLWLGTFDTAEEAALAYDKAAFKLRGDHARLNFPNLRHNGSHIGGEFGEYKPLHSTVDAKLEAICQSMAETQKQDKTAKASKKRASKVKKTEKVDLSEKVSPVTEFVESAGSSPLSELTFADTEEQPRWNETFSLEKYPSYEIDWDSILS

SEQ ID NO: 336 - DNA, 807 bp, Brassica napus
atggaagctgctatgaatatgtacaatagcataacgtttcaacagccagattcgtttggtggtggtgaactcatggaagcgctagtaccttatataagtagcgtttccaattcttctcctcatcctcttcctcccatgcaccatcagagccacaacaacaccttctcgaaccttctcagccctaagccgttactgatgaagcagaccggtgccaccggatcttgtttcgcctatggtgctccggccaagccgacgaagctgtacagaggcgtgaggcagcgtcactgggggaaatgggtggcggagatccgtttgccgaggaaccgtacccgtctctggcttgggacgttcgacacggcggaggaagctgcgttggcctacgacaaggcggcgtataagctgcgcggcgatttcgcccggcttaacttccctaacctgcgtcacaatgggtcccacatcggaggcgagttcggcgagtacaaaccgcttcactccaccgtcgacgccaagctcgaagctatttgtcagagcatggcggaggcggagaaacagggcaaaactacgacgaaagcatcgaagaaacgtgcctcgaagacggtttcatcgccggagaaagttaaggcggaggataactcgaactcggtcggtggatctccgccggtgacggagttcgttgagtccgccggttcttcgccgttgtcggacttaacgttcgccgacacggaggagctgccgcagtggaacgagacgttctcgttggagaagtatccgtcgtacgagatagattgggattcgatcctgtcttga

SEQ ID NO: 337 - protein, 268 aa, Brassica napus
MEAAMNMYNSITFQQPDSFGGGELMEALVPYISSVSNSSPHPLPPMHHQSHNNTFSNLLSPKPLLMKQTGATGSCFAYGAPAKPTKLYRGVRQRHWGKWVAEIRLPRNRTRLWLGTFDTAEEAALAYDKAAYKLRGDFARLNFPNLRHNGSHIGGEFGEYKPLHSTVDAKLEAICQSMAEAEKQGKTTTKASKKRASKTVSSPEKVKAEDNSNSVGGSPPVTEFVESAGSSPLSDLTFADTEELPQWNETFSLEKYPSYEIDWDSILS

SEQ ID NO: 338 - DNA, 927 bp, Glycine max
atgaatttctacaacggaacatcacaagaacaagttgagtcagatccattcagaggtgagctcatggaagttctagaaccttttatgaaaactagtccttcctcaacaactccctctattattctctcttcagattcaccttcatcttcatcttttaatttcccttcctcttctttactttctccacaccccaatttctacacacacactccccccccttcctacttactccaaagccaacaatccttaataggctttgagcaaccaccgagttcccttctcgggctcaaccacctaagcccgtctcagatttctcagatccaggcccagatcgaggcccaacagagccaaaaccagaacccacactctctcaactttctcggcccgaagcccgtcccaatgaagcacgtgggcgggcctccgaagcccacgaagctgtaccggggcgtaaggcagaggcattgggggaagtgggtggcggagatcaggctcccgaagaaccgaaccaggctctggctcggaaccttcgacacggcggaggaagctgctttggcttacgacaaagccgcgtataggctccgaggcgacttcgcgaggctgaacttcccgagcctgaaaggctcgtgccccggggaggagtacaagcctgtgcattccgcggtggacgctaagctcgacgcgatttgcgccaacttggcggaaatgcagaagcaagggaagacggagaaaggtgccaggtcagcgaagaaatcgaagcaaggtccgaaccaggaggccaagcccgaacctcaagcttccgctgaaagtgagggttctgcggattcttctccgctgtctgatcttacctttgatgtaaccgagccgcaatgggaacattttaatttgcagaagtttccttcttatgagatcgattgggattctctctga

SEQ ID NO: 339 - protein, 308 aa, Glycine max
MNFYNGTSQEQVESDPFRGELMEVLEPFMKTSPSSTTPSIILSSDSPSSSSFNFPSSSLLSPHPNFYTHTPPPSYLLQSQQSLIGFEQPPSSLLGLNHLSPSQISQIQAQIEAQQSQNQNPHSLNFLGPKPVPMKHVGGPPKPTKLYRGVRQRHWGKWVAEIRLPKNRTRLWLGTFDTAEEAALAYDKAAYRLRGDFARLNFPSLKGSCPGEEYKPVHSAVDAKLDAICANLAEMQKQGKTEKGARSAKKSKQGPNQEAKPEPQASAESEGSADSSPLSDLTFDVTEPQWEHFNLQKFPSYEIDWDSL

SEQ ID NO: 340 - DNA, 852 bp, Hordeum vulgare
atggctgcagctatagatctgtccggggaggatctggtgagagcactcgagccttttatccgagaggcctctgccccccctccgctccactcccatcctagtcccacctcgccattctccttcccccacgccgcctacagtggttacccgtacggggtgcaggcacaggcccagaccgagctcagcccggcccagatgcactacatccaggcacgcctccacctccagcgccagaccggccagccgggccacctcggcccgcggccccagcccatgaagcccgcttcggcggcagcggccacaccgccgcggccgcagaagctctaccgcggcgttcggcagcgccactggggcaagtgggtggcggagatccgcctcccccgcaaccgcacccgcctctggctcggcaccttcgacaccgccgaggaggcggctctcgcctacgaccaggccgcctaccgcctccgtggcgacgcagcgcgcctcaacttccccgacaacgccgcctcccgcggcccgctccatgcctctgttgacgccaagctccagaccctctgccagaacatcaccgcttccaagaacgccaagaagtccgcctccgtctccgcgtccaccgccgcagccacgtcgtccacccccaccagcaactgctcctcgccgtcctccgacgaggcgtcgtcctcgctcgagtccgccgagtcgtcaccatcacccaccaccaccgcagcagaggttcctgagatgcagcagctcgacttcagcgaggcaccatgggacgaggcagccggcttcgccctcaccaagtacccgtcctatgagatcgactgggactcgctcctcgccaccaattag

SEQ ID NO: 341 - protein, 283 aa, Hordeum vulgare
MAAAIDLSGEDLVRALEPFIREASAPPPLHSHPSPTSPFSFPHAAYSGYPYGVQAQAQTELSPAQMHYIQARLHLQRQTGQPGHLGPRPQPMKPASAAAATPPRPQKLYRGVRQRHWGKWVAEIRLPRNRTRLWLGTFDTAEEAALAYDQAAYRLRGDAARLNFPDNAASRGPLHASVDAKLQTLCQNITASKNAKKSASVSASTAAATSSTPTSNCSSPSSDEASSSLESAESSPSPTTTAAEVPEMQQLDFSEAPWDEAAGFALTKYPSYEIDWDSLLATN

SEQ ID NO: 342 - DNA, 1017 bp, Oryza sativa
atggccgcagcaatagacatgtacaagtataacactagcacacaccagatcgcatcctcggatcaggagctcatgaaagcgctcgaaccttttattaggagcgcttcttcttcctccgcttcctccccctgccaccactactactcttcttctccttccatgagccaagattcttacatgcccaccccatcttatcccacttcctctatcacaaccgccgccgccaccaccacctcgtctttctcgcagctacctccgctgtactcttcgcagtatcatgctgcttcacctgcggcgtcggcgacgaacgggccgatggggctgacccacctgggcccagcccagatccagcagatccaggcccagttcttggcccagcagcagcagcagagggccctggccggcgccttccttcggccgcgtggccagccgatgaagcagtccgggtcgccgccgcgcgcggggccgttcgcggcggtcgccggggcggcgcagtcgaagctctaccgcggagtgcggcagcgccactgggggaagtgggtggcggagatccgcctcccgaagaaccggacgcggctgtggctcggcaccttcgacaccgccgaggacgccgcgctcgcctacgacaaggccgccttccgcctccgcggcgacctcgcgcggctcaacttccccaccctccgccgcggcggcgcccacctcgccggcccgctccacgcctccgtcgacgccaagctcaccgccatctgccagtccctcgccacgagctcgtccaagaacacccccgccgagtcagcggcctccgcggcggagccggagtcccccaagtgctcggcgtcgacggaaggggaggactcggtgtccgccggctcccctcctccgcccacgccgctgtcgcccccggtgccggagatggagaagctggacttcacggaggcgccatgggacgagtcggagacattccacctgcgcaagtacccgtcctgggagatcgactgggactcaatcctctcataa

SEQ ID NO: 343 - protein, 338 aa, Oryza sativa
MAAAIDMYKYNTSTHQIASSDQELMKALEPFIRSASSSSASSPCHHYYSSSPSMSQDSYMPTPSYPTSSITTAAATTTSSFSQLPPLYSSQYHAASPAASATNGPMGLTHLGPAQIQQIQAQFLAQQQQQRALAGAFLRPRGQPMKQSGSPPRAGPFAAVAGAAQSKLYRGVRQRHWGKWVAEIRLPKNRTRLWLGTFDTAEDAALAYDKAAFRLRGDLARLNFPTLRRGGAHLAGPLHASVDAKLTAICQSLATSSSKNTPAESAASAAEPESPKCSASTEGEDSVSAGSPPPPTPLSPPVPEMEKLDFTEAPWDESETFHLRKYPSWEIDWDSILS

SEQ ID NO: 344 - DNA, 876 bp, Oryza sativa
atggctgcagctatagatctgtcaggggaggagctgatgagagcactcgagccttttatccgagatgcctccggctcgcctccggtttgttcccagtttagtcccacctcgccattctccttcccgcacgcgttcgcgtacggtggcgggctggcccagcagccagagctcagcccggcccagatgcactacatccaggcccgcctccacctccagcggcaggcggcgcaggccggcccgctcggcccgcgcgcgcagccgatgaaggcgtcgtcgtcgtcggcttcggcggcgggggcggcggcgacgccgccgcggccgcagaagctgtaccgcggcgtgcggcagcggcactgggggaagtgggtggcggagatccgcctcccgcggaaccgcacgcggctctggctcggcaccttcgacacagccgaggaggcggcgcttgcctacgaccaggcggcgtaccgcctccgcggcgacgcggcgcggctcaacttccccgacaacgccgcctcccgcggcccgctccacgcctccgtcgacgccaagctccagacgctctgccagaacatcgccgccgccaagaacgccaagaagtcctctgtctccgcctccgccgccgcaacatcctccgcgcccaccagcaactgctcgtcgccgtcctccgacgacgcgtcgtcctgcctggagtccgccgactcgtcgccctccctgtcgccgtcctccgccgccaccacggccgagacgccggcgaccgtgccggagatgcagcagctcgacttcagcgaggcgccgtgggacgaggccgccgccttcgccctcaccaagtacccgtcctacgagatcgactgggactccctcctcgccgccaattaa

SEQ ID NO: 345 - protein, 291 aa, Oryza sativa
MAAAIDLSGEELMRALEPFIRDASGSPPVCSQFSPTSPFSFPHAFAYGGGLAQQPELSPAQMHYIQARLHLQRQAAQAGPLGPRAQPMKASSSSASAAGAAATPPRPQKLYRGVRQRHWGKWVAEIRLPRNRTRLWLGTFDTAEEAALAYDQAAYRLRGDAARLNFPDNAASRGPLHASVDAKLQTLCQNIAAAKNAKKSSVSASAAATSSAPTSNCSSPSSDDASSCLESADSSPSLSPSSAATTAETPATVPEMQQLDFSEAPWDEAAAFALTKYPSYEIDWDSLLAAN

SEQ ID NO: 346 - DNA, 978 bp, Populus trichocarpa
atggaagctcttgaaccttttatgagaagtgcttccccttcaactaccccatctccttctcaaacctctaactatccttcttctccttctcccccctctacatcatccaatcggttttctttctccccacaaccaccacagcaacatcaacagtcccttttcaacccagatggttgctgctctacgtcgacaacctatccattttcaactgggttgtcgttcaacgacccaatgggtctccagcaaccatccagttcaattgggcttaaccaccttacaccaacccaggtccaccagatccaaacccagatgcaccataataacctctcatatcttcaagcttaccaacaaccccaaaccctcaaattcttatccccaaagccgatccccatgaaacaaatcggcacaccaccaaaagccacaaaactttatagaggagtaaggcaaaggcactggggcaaatgggtcgctgagatccgtttgcccaagaaccgaacccgactctggcttggcacatttgacacagcagaggaggcagctttggcttatgacagagcagcttataaactaagaggcgactttgcaagactgaacttcccaaacttactccaccaagggtcctacatcggcgaatacaagcctctccattcctcagtggatgcgaaacttcaagctatttgtaaaagcttggagaactcttcgcagcagaaacaaggagggaaagcaaagaggcaaagtaactcgacgaagaagaaagccaacttggcagtggtgacccaggaggaggagcaagtggttgttaaggctgagacagagtccccggcattgacggagagtactgcgtcgggtggatcttcgcctttgtcggatctgacgtttccggattttgaggaagcaccgttggattttgaatcggggaattttatgttgcagaagtatccctcttatgagattgattgggcttcaattttatcttag

SEQ ID NO: 347 - protein, 325 aa, Populus trichocarpa
MEALEPFMRSASPSTTPSPSQTSNYPSSPSPPSTSSNRFSFSPQPPQQHQQSLFNPDGCCSTSTTYPFSTGLSFNDPMGLQQPSSSIGLNHLTPTQVHQIQTQMHHNNLSYLQAYQQPQTLKFLSPKPIPMKQIGTPPKATKLYRGVRQRHWGKWVAEIRLPKNRTRLWLGTFDTAEEAALAYDRAAYKLRGDFARLNFPNLLHQGSYIGEYKPLHSSVDAKLQAICKSLENSSQQKQGGKAKRQSNSTKKKANLAVVTQEEEQVVVKAETESPALTESTASGGSSPLSDLTFPDFEEAPLDFESGNFMLQKYPSYEIDWASILS

SEQ ID NO: 348 - DNA, 1119 bp, Populus trichocarpa
atggcagcagctatcgatatctacaacacaacagtgccagttttttcagatccttgtagagaagaactcatgaaagcacttgaaccttttatgaaaagtgcttcgccatcaccaacttccacttattcttcaccttctccatcaacttcttctcctcctttctcttctcacccttcttgcttttacaacaataactctctcatctcttcatatcccaacttggaccttagcttttgctctccaacgagcacccagatgttttctaatgggttcttggattataaccaaatgggttttgagcaaacaggtccaattgggcttaaccaccttacaccttcacaaatcctccaaatccaagccaaaatccacttccaacaacaacagcagcagaaaatggaaaatcttgctaccaccacatcacagtttgtccataaccaaagggctagtaacttcttggctccaaaacctgtccctatgaaacaatctgctgcttctcctcaaaagccaacaaagctttatagaggagtcaggcagaggcattggggaaaatgggttgctgagattagacttccaaagaacagaactagactctggcttggcacttatgacacagctgaagaggcagctttggcttatgataatgctgcttataagctgagaggagaatatgctaggcttaactttccacatcttcgccaccagggagctcatgtgtctggtgaatttggtgattacaagcctctccattcctctgttgatgcaaagttacaagcaatttgtcaaagcctgggcttgcaaaaacaggggaaaacaagggagcccagctctgttgctaattccaaaaagactgcaacagctcctttgcaagcaaaaattgaagatgattgttctttgagaggcgaattgaaaacggagtatgagaattttggagttgaggactataaggtggagatcccatcaccatcaccagcttcatctgacgaatcattggctggttcttcttcaccagaatctgagatttctttcttggatttctctggttctttacagtgggacgagtttgagaattttggtttggagaagtacccttcagttgagattgactggtcatccatctaa

SEQ ID NO: 349 - protein, 372 aa, Populus trichocarpa
MAAAIDIYNTTVPVFSDPCREELMKALEPFMKSASPSPTSTYSSPSPSTSSPPFSSHPSCFYNNNSLISSYPNLDLSFCSPTSTQMFSNGFLDYNQMGFEQTGPIGLNHLTPSQILQIQAKIHFQQQQQQKMENLATTTSQFVHNQRASNFLAPKPVPMKQSAASPQKPTKLYRGVRQRHWGKWVAEIRLPKNRTRLWLGTYDTAEEAALAYDNAAYKLRGEYARLNFPHLRHQGAHVSGEFGDYKPLHSSVDAKLQAICQSLGLQKQGKTREPSSVANSKKTATAPLQAKIEDDCSLRGELKTEYENFGVEDYKVEIPSPSPASSDESLAGSSSPESEISFLDFSGSLQWDEFENFGLEKYPSVEIDWSSI

SEQ ID NO: 350 - DNA, 1035 bp, Populus trichocarpa
atggatttccacagtagtagtccgcttcaatcagacctcctcgggggtggtgagttaatggaagcacttgaaccttttatgagaagtgcttccccttcaactaccctatctccttctcaaacctctaactatccttcttctccttctcccccctctacatcatccaatcggttttctttctccccacaaccaccacagcaacatcaacagtcccttttcaacccagatggttgctgctctacgtcgacaacctatccattttcaactgggttgtcgttcaacgacccaatgggtctccagcaaccatccagttcaattgggcttaaccaccttacaccaacccagatccaccagatccaaacccagatgcaccataataacctctcatatcttcaagcttaccaacaaccccaaaccctcaaattcttatccccaaagccgatccccatgaaacaaatcggtacaccaccaaaagccacaaaactttatagaggagtaaggcaaaggcactggggcaaatgggtcgctgagatccgtttgcccaagaaccgaacccgactctggcttggcacatttgacacagcagaggaggcagctttggcttatgacagagcagcttataaactaagaggcgactttgcaagactgaacttcccaaacttactccaccaagggtcctacatcggcgaatacaagcctctccattcctcagtggatgcgaaacttcaagctatttgtaaaagcttggagaactcttcgcagcagaaacaaggagggaaagcaaagaggcaaagtaactcgacgaagaagaaagccaacttggcagtggtgacccaggaggaggagcaagtggttgttaaggctgagacagagtccccggcattgacggagagtactgcgtcgggtggatcttcgcctttgtcggatctgacgtttccggattttgaggaagcaccgttggattttgaatcggggaattttatgttgcagaagtatccctcttatgagattgattgggcttcaattttatcttag

SEQ ID NO: 351 - protein, 344 aa, Populus trichocarpa
MDFHSSSPLQSDLLGGGELMEALEPFMRSASPSTTLSPSQTSNYPSSPSPPSTSSNRFSFSPQPPQQHQQSLFNPDGCCSTSTTYPFSTGLSFNDPMGLQQPSSSIGLNHLTPTQIHQIQTQMHHNNLSYLQAYQQPQTLKFLSPKPIPMKQIGTPPKATKLYRGVRQRHWGKWVAEIRLPKNRTRLWLGTFDTAEEAALAYDRAAYKLRGDFARLNFPNLLHQGSYIGEYKPLHSSVDAKLQAICKSLENSSQQKQGGKAKRQSNSTKKKANLAVVTQEEEQVVVKAETESPALTESTASGGSSPLSDLTFPDFEEAPLDFESGNFMLQKYPSYEIDWASILS

SEQ ID NO: 352 - DNA, 855 bp, Triticum aestivum
atggctgcagctatagatctgtccggggaggatctggtgagagcactcgagccttttatccgagaagcctctgccccccttccactccactcccatcttagtcccacctcgccattctccttcccccacgccgcctacagtgggtacccgtacggggtgcaggcacaggcccagaccgagctcagcccggcccagatgcactacatccaggcacgcctccacctccagcgccagaccggccagccgggccacctcggcccacggccccagcccatgaagcccgcttcggtggcagcggcgaccccgccgcggccgcagaagctctaccgtggcgtgcggcagcgccactggggcaagtgggtggcggagatccgcctcccccgcaaccgcacccgcctctggctaggcaccttcgacaccgccgaggaggcggccctcgcctacaacaagcacgcctaccgcctccgcggcgaccaagcgcggctcaacttccccgacaacgccgcctcccgcggcccgctcaatgcctccgttgatgccaagctccagaccctctgccagaacatcaccgcctccaagaacggcaagaagtccgcctccgtctccgcgtccaccgccgcagccacgtcgtccacccccaccagcaactgctcctcgccgtcctccgacgaggcgtcgtcctcgctggagtccgcggagtcgtcaccgtctctctctctctctctctctgtctctgtttctgtgtttctgtctctctctttctgtgtgtctctctgggacgaggcagcctgcttcgccctcaccaagtacccgtcgtacgagatcgactgggactcgcttctcgccaccaattag

SEQ ID NO: 353 - protein, 284 aa, Triticum aestivum
MAAAIDLSGEDLVRALEPFIREASAPLPLHSHLSPTSPFSFPHAAYSGYPYGVQAQAQTELSPAQMHYIQARLHLQRQTGQPGHLGPRPQPMKPASVAAATPPRPQKLYRGVRQRHWGKWVAEIRLPRNRTRLWLGTFDTAEEAALAYNKHAYRLRGDQARLNFPDNAASRGPLNASVDAKLQTLCQNITASKNGKKSASVSASTAAATSSTPTSNCSSPSSDEASSSLESAESSPSLSLSLSVSVSVFLSLSFCVSLWDEAACFALTKYPSYEIDWDSLLATN

SEQ ID NO: 354 - DNA, 987 bp, Triticum aestivum
atggccgctgccatagacatgtacaagtacaacaccagcacgcaccagatcggctccgccgcctctgcctcggatcaggagctcatgaaagcactcgaaccttttatcacgattgcttcctcctcttcctctcactacccctaccactactactcctctccctccatgacccaagattcgtacatggccaccccatcgtcgtcgtcctacgcctcctcgttcgcagcctctcctctgcccaccaccgcccccgcctcgccgtctttctcccagcttccgccgctctactcctcgcagtatgccgtgaacggatccatggggctggcccagctcggcccggcccagatccagcagatccaggcccagttcttcgtccagcagcagcagcagcagcagaggggcctggctggtggctccttcctcggcccgcgcgcgctgccgatgaagcagtccgggtcgccgccgcgcgcgtccgccgccgcgctggcgctggccggagtggcgcccgcgcagtccaagctgtaccgcggcgtgcggcagcggcactggggcaagtgggtggcggagatccgcctccccaagaaccgcaccaggctgtggctcggcaccttcgacaccgccgaggacgccgcgctcgcctacgacaaggccgccttccgcctccgcggcgacctcgcccgcctcaacttcccgtcgctccggcgcggcggcgcccacctggccggcccgctccacgcctccgtcgacgccaagctcaccgccatctgcgagtccctcgccgcgccctcgtccaagaactcggagccggagtcccccaagtgctcggcgtcgacggagggcgaggactcggcgtccgccgggtccacgccgccggtcccggagatggagaagctggacttcacggaggcgccgtgggacgagtcggagaccttccacctgcgcaagtacccgtccgtggagatcgactgggactccatcctgtcgtga

SEQ ID NO: 355 - protein, 328 aa, Triticum aestivum
MAAAIDMYKYNTSTHQIGSAASASDQELMKALEPFITIASSSSSHYPYHYYSSPSMTQDSYMATPSSSSYASSFAASPLPTTAPASPSFSQLPPLYSSQYAVNGSMGLAQLGPAQIQQIQAQFFVQQQQQQQRGLAGGSFLGPRALPMKQSGSPPRASAAALALAGVAPAQSKLYRGVRQRHWGKWVAEIRLPKNRTRLWLGTFDTAEDAALAYDKAAFRLRGDLARLNFPSLRRGGAHLAGPLHASVDAKLTAICESLAAPSSKNSEPESPKCSASTEGEDSASAGSTPPVPEMEKLDFTEAPWDESETFHLRKYPSVEIDWDSILS

SEQ ID NO: 356 - DNA, 1062 bp, Triticum aestivum
atggccgctgccatagacatgtacaagtacaacaccagcacgcaccagatcggctccgccgcctctgcttcggatcaggagctcatgaaagcactcgaaccttttatcacgattgcttcctcctcttcctctcactacccgtaccagtactactcttctccctccatgacccaaaattcatacatggccaccccatcgtcgtcctacgcctcctcgttcgcagtctctcctctgcccaccaccgcgcccgcctcgccgtctttctcgcagcttccgccgctctactcctcgcagtatgccgcttcgggcatgaacggatccatggggctggcccagctcggcccggcccagatccagcagatccaggcccagttcttcgtccagcagcagcagcagcagaggggcctggctggtggctcgttccttgggccgcgcgcgcagccgatgaagcagtccgggtcgccgccgcgcgcgtccgccgcggcgctggcgctggccggagtggcgcccgcgcagtccaagctgtaccgcggcgtgcggcagcgccactggggcaagtgggtggcggagatccgcctccccaagaaccgcacgaggctgtggctcggcaccttcgacaccgccgaggacgccgcgctcgcctacgacaaggccgcccttccgcctccgcggcgacctcgcccgcctcaacttcccgtcgctccgccgcggcggcgcccacctggccggcccgctccacgcctccgtcgacgccaagctcaccgccatctgcgagtccctcgccgcgccctcgtccaagaactcggagccggagtcccccaagtgctcggcgtcgacggagggcgaggactcggcgtccgccgggtccccgccgccgcccacgccgcccgtcccggagatggagaagctggacttcacggaggcgccgtgggacgagtcggagaccttccacctgcgcaagtacccgtccgtggagatcgactgggactccatcctgtcgtgaacagcaagcagctgctactactagtacagtcttcgttaagctccgtagctatgatgtaa

SEQ ID NO: 357 - protein, 353 aa, Triticum aestivum
MAAAIDMYKYNTSTHQIGSAASASDQELMKALEPFITIASSSSSHYPYQYYSSPSMTQNSYMATPSSSYASSFAVSPLPTTAPASPSFSQLPPLYSSQYAASGMNGSMGLAQLGPAQIQQIQAQFFVQQQQQQRGLAGGSFLGPRAQPMKQSGSPPRASAAALALAGVAPAQSKLYRGVRQRHWGKWVAEIRLPKNRTRLWLGTFDTAEDAALAYDKAALPPPRRPRPPQLPVAPPRRRPPGRPAPRLRRRQAHRHLRVPRRALVQELGAGVPQVLGVDGGRGLGVRRVPAAAHAARPGDGEAGLHGGAVGRVGDLPPAQVPVRGDRLGLHPVVNSKQLLLLVQSSLSSVAMM

SEQ ID NO: 358 - DNA, 1002 bp, Triticum aestivum
atggccgctgccatagacatgtacaagtacaacaccagcacgcaccagatcggctctgccgcctctgcttcggatcaggagctcatgaaagcactcgaaccttttatcacgattgcttcctcctctccctacccctaccagtactactcttctccctccatgacccaagattcatacacggccaccccatcatcatcgtacgcctcgttcgcgacctctcctctacccaccaccgcacccacctcgccgtctttctcgcagcttccgccgctctactcctcgcagtattccaccgcttcgggcatgaacggatccatggggctggcccagctcggcccggcccagatccagcagatccaggcccagttcttcgtccagcagcagcagcagcagaggggcctggctggctccttccttgggccgcgcgcgcagccgatgaagcagtccgggtcgccgccgcgcgcgtccgccgcggcgctggccctggccggagtggcgcctgcgcagtccaagctgtaccgcggcgtgcggcagcgtcactggggcaagtgggtggcggagatccgcctccccaagaaccgcacgaggctgtggctcggcaccttcgacaccgccgaggacgccgcgctcgcctacgacaaggccgccttccgcctccgcggggacctcgcccgcctcaacttcccgtcgctccgacgcggcggcgcccacctggccggcccgctccacgcctccgtcgacgccaagctcaccgccatctgcgagtccctcgccgcgccctcgtccaagaactcggccgaggcggagccggagtcccccaagtgctcggcgtcgacggagggtgaggactcggcgtccgccgggtcccccccgccgcccacgccgccggtcccggagatggagaagctggacttcacggaggcgccgtgggacgagtcggagaccttccacctgcgcaagtacccgtccgtggagatcgactgggactccatcctgtcgtga

SEQ ID NO: 359 - protein, 333 aa, Triticum aestivum
MAAAIDMYKYNTSTHQIGSAASASDQELMKALEPFITIASSSPYPYQYYSSPSMTQDSYTATPSSSYASFATSPLPTTAPTSPSFSQLPPLYSSQYSTASGMNGSMGLAQLGPAQIQQIQAQFFVQQQQQQRGLAGSFLGPRAQPMKQSGSPPRASAAALALAGVAPAQSKLYRGVRQRHWGKWVAEIRLPKNRTRLWLGTFDTAEDAALAYDKAAFRLRGDLARLNFPSLRRGGAHLAGPLHASVDAKLTAICESLAAPSSKNSAEAEPESPKCSASTEGEDSASAGSPPPPTPPVPEMEKLDFTEAPWDESETFHLRKYPSVEIDWDSILS

SEQ ID NO: 360 - DNA, 915 bp, Zea mays
atggcggctacgacgatagattggcacgcccgcaacaacgccgcgcttcccgccgccatgtatggcgtggccgtgccggacagcaaggagctcgtgcgcgcgcttgctccgcccacgcagcaggccccgaccatctcgttcgcgtacccctgctccggcgtggagcagcagagcgcggcgggctcgtttctgggtgccggcggcagtggcctgaccccggcgcagatcctccaggtgcagtcgcggctccagttcctgcgccggccggcgggggccgcggtcgccacccagccgatgaagcggcagggcgtgccgctgccgcaggcgccggcggtgtccaagctgtaccgcggcgtccggcagcggcattgggggaagtgggtggcggagatccgcctgccacgaaaccgcacccgcctctggctcggcaccttcgacaccgccgaggaggctgcgctcgcctacgacagcgccgcgttccgcctccgcggggactccgccaggctcaactttcccgagctcaggcgcggcggccagcacctcggcccgccgctccacgccgcggtcgacgccaagctccacgccatctgcaacggcacggacgtcgtcgtgccgccgccgcagagccggagcaacgacgccacggtggtagcgacggcgacggcgacggcgacaaccgccccgagccccttctcctcggcgagtccacacgtcaagagcgagccgggctcctccggctccgatagctcgttttccgcagacggcgacgtgtcctccactgggtcctccgacgtggtgctggatatgcaactgctcgacttctcagaagcgccatgggatgattccgagagcttccgccttcgcaaatacccctccatggagatcgactgggactcgatactactaatttcataa

SEQ ID NO: 361 - protein, 304 aa, Zea mays
MAATTIDWHARNNAALPAAMYGVAVPDSKELVRALAPPTQQAPTISFAYPCSGVEQQSAAGSFLGAGGSGLTPAQILQVQSRLQFLRRPAGAAVATQPMKRQGVPLPQAPAVSKLYRGVRQRHWGKWVAEIRLPRNRTRLWLGTFDTAEEAALAYDSAAFRLRGDSARLNFPELRRGGQHLGPPLHAAVDAKLHAICNGTDVVVPPPQSRSNDATVVATATATATTAPSPFSSASPHVKSEPGSSGSDSSFSADGDVSSTGSSDVVLDMQLLDFSEAPWDDSESFRLRKYPSMEIDWDSILLIS

SEQ ID NO: 362 - DNA, 1023 bp, Zea mays
atggccgcagccatcgacatgtacaagtactacaataccagcgcacaccagatcccctcctcctccccctcggatcaggagctctcgaaagcactcgagccttttataacgagtgcttcctcctcttcgtcctcctccccctaccatggctactcgtcctctccatgcatgtcccaagattcttacatgcctacaccctcttacaccagctacgccacctcgcctcttcccactcccgccgccgcctcctcctcgcagtcgcagcttccgccgctctactcgtcgccttatgcggcgccgtgcatggccggccagatgggcctgaaccagctcggcccggcccagatccagcagatccaggcccagttcatgttccagcagcagcagcagcagaggggcctgcacgcggcgttcctgggcccgcgggcgcagccgatgaagcagtcagggtcgccgccgccgccgctggcgccggcgcagtcgaagctgtaccgcggcgtgcggcagcgccactggggcaagtgggtggcggagatccggctccccaagaaccgcacgcggctgtggctcggcaccttcgacaccgccgaggacgcggcgctcgcctacgacaaggcggccttccgcctccgcggcgacacggcgcggctcaacttcccggccctccggcgcggcggcgcgcacctcgccggcccgctgcacgcctccgtggacgccaagctgaccgccatctgccagtccctgtcggagtccaagtccaagagcggctcgtccggcgacgagtcggccgcgtccccgccggactcccccaagtgctcggcgtcgacgacggagggagagggggaggaggagtcgggctccgccggctcccctcctcctcctcctcctcccccgacgctggcgccgcccgtgccggagatggcgaagctggacttcacggaggcgccgtgggacgagacggaggccttccacctgcgcaagtacccgtcctgggagatcgactgggattccatcctgtcatga

SEQ ID NO: 363 - protein, 340 aa, Zea mays
MAAAIDMYKYYNTSAHQIPSSSPSDQELSKALEPFITSASSSSSSSPYHGYSSSPCMSQDSYMPTPSYTSYATSPLPTPAAASSSQSQLPPLYSSPYAAPCMAGQMGLNQLGPAQIQQIQAQFMFQQQQQQRGLHAAFLGPRAQPMKQSGSPPPPLAPAQSKLYRGVRQRHWGKWVAEIRLPKNRTRLWLGTFDTAEDAALAYDKAAFRLRGDTARLNFPALRRGGAHLAGPLHASVDAKLTAICQSLSESKSKSGSSGDESAASPPDSPKCSASTTEGEGEEESGSAGSPPPPPPPPTLAPPVPEMAKLDFTEAPWDETEAFHLRKYPSWEIDWDSILS

SEQ ID NO: 364 - DNA, 951 bp, Zea mays
atggccgcagccatagacatgtacaagtactgcaataccagcgcacaccttatcgcctcctcgtccccctcggatcaggagctcgcgaaagcactcgagccttttataacgagtgcttcctccccctaccatcgctactcgttggccccagattcttacatgcctacaccctcctcctacaccacctcgcctcttcccacccccacctcctcgcctttctcgcagcttccgccactctactcgtcgccttacgcggcttcgacggcgtcgggcgtggctgggccgatgggcctgaaccagctcggcccggcccagatccagcagatccaggcccagctcatgttccagcaccagcagcagaggggcctgcacgcggcgttcctgggcccgcgggcgcagccgatgaagcagtccgggtcgccgccggcgcagtcgaagctgtaccgcggcgtgcgccagcgccactggggcaagtgggtggcggagatccgcctccccaagaaccgcacgcggctgtggctcggcaccttcgacaccgccgagggcgcggcgctggcctacgacgaggcggccttccgcctccgcggcgacacggcgcgcctcaacttcccgtccctccgccgcggcggcggcgcgcgcctcgccggcccgctccacgcctccgtggacgccaagctcaccgccatctgccagtccctggcggggtccaagaacagctcgtccagcgacgagtcggccgcgtccctgccggactcccccaagtgctcagcgtcgacggagggggatgaggactcggcctccgccggctcccctccttccccgacgcaggcgccgcccgtgccggagatggcgaagctggacttcaccgaggcgccgtgggacgaaacggaggccttcccactgcgcaagtacccgtcctgggagatcgactgggattccatcctttcatga

SEQ ID NO: 365 - protein, 316 aa, Zea mays
MAAAIDMYKYCNTSAHLIASSSPSDQELAKALEPFITSASSPYHRYSLAPDSYMPTPSSYTTSPLPTPTSSPFSQLPPLYSSPYAASTASGVAGPMGLNQLGPAQIQQIQAQLMFQHQQQRGLHAAFLGPRAQPMKQSGSPPAQSKLYRGVRQRHWGKWVAEIRLPKNRTRLWLGTFDTAEGAALAYDEAAFRLRGDTARLNFPSLRRGGGARLAGPLHASVDAKLTAICQSLAGSKNSSSSDESAASLPDSPKCSASTEGDEDSASAGSPPSPTQAPPVPEMAKLDFTEAPWDETEAFPLRKYPSWEIDWDSILS

SEQ ID NO: 366 - DNA, 780 bp, Zea mays
atggccgctgctataaatctccccgggcccagcgaggatctgatgcgagcgatggagtccttcatgcaagacgacgccccatcccctctggccatgccgccggcgccgtctttcccagcggccgcagcccacggggcccagtacccggcgacccacctgagcccggcgcagatgcagttcatccaggcccagctccacctgcagcggaacccggggctgggcccgcgggcgcagcccatgaagcccgccgtcccagtgccgccggcgccggcgccgcagcggcctgtgaagctgtaccgcggcgtgcggcagcgtcactggggcaagtgggtggccgagatccggctcccccggaaccgcacccgcctgtggctcgggaccttcgacaccgccgagcaggcggcgctggcctacgacccaggcggcgtaccgcctccgcggggacgcggcgcggctcatcttccccgacaacgcggagtccagggcgccgctcgaccccgccgtggacgccaagctgcaggccatctgcgccaccttcgccgccgcgtcgtcgtcttcctagatttccatggccatgagcaaggcgatgccaatcaacgcgtccgttctgggagcggctgcggcgtctccgagcaactgctcctccgacgaaagttccggctccgggttcgggtcggacgacgagatgtcctcgtcctccccgacgccggtggtggcgccgccggtggcgggcttgggaccgctggttttccgcgagggttcctggggcttggtccatag

SEQ ID NO: 367 - protein, 259 aa, Zea mays
MAAAINLPGPSEDLMRAMESFMQDDAPSPLAMPPAPSFPAAAAHGAQYPATHLSPAQMQFIQAQLHLQRNPGLGPRAQPMKPAVPVPPAPAPQRPVKLYRGVRQRHWGKWVAEIRLPRNRTRLWLGTFDTAEQAALAYDPGGVPPPRGRGAAHLPRQRGVQGAARPRRGRQAAGHLRHLRRRVVVFLDFHGHEQGDANQRVRSGSGCGVSEQLLLRRKFRLRVRVGRRDVLVLPDAGGGAAGGGLGTAGFPRGFLGLGP

SEQ ID NO: 368 - DNA, 903 bp, Zea mays
atggcggctacgacgatagattggcacgcccgcaacaacgccgcgcttcccgccgccatgtatggcgtggccgtgccggacagcaaggagctcgtgcgcgcgcttgctccgcccacgcagcaggcaccgaccatctcgttcgcgtacccccgctccggcgtggagcagcagagcgcggcgggctcgtttctgggtgccggcggtagtggcctgaccccggcacagatcctccaggtgcagtcgcggctccagttcctgcgccggccggcgggggccgcggtcgccacccagccgatgaagcggcagggcgtgccgctgccgcaggcgccggcggtgtccaagctgtaccgcggcgtccggcagcggcattgggggaagtgggtcgcggagatccgcctgccacgaaaccgcacccgcctctggctcggcaccttcgacaccgctgaggaggctgcgctcgcctacgacagcgccgcgttccgcctccgcggggactccgccaggctcaactttcccgagctcaggcgcggcggccagcacctcggcccgccgctccacgccgcggtcgacgccaagctccacgccatctgcaacggcacggacgtcgtcgtgccgctgccgcagagccggagcaacgacgccacggcggcggcgacggcgacaaccgccccgagccccttctcctcggcgagtccacacgtcaagagcgagccgggctcctccggctccgatagctcgttttccgcagacggcgacgtgtcctccactgggtcctccgacgtggtgctggatatgcaactgctcgacttctcagaagcgccatgggatgattctgagagcttcggccttcgcaaatacccctccttggagatcgactgggactcgatactactaatttcataa

SEQ ID NO: 369 - protein, 300 aa, Zea mays
MAATTIDWHARNNAALPAAMYGVAVPDSKELVRALAPPTQQAPTISFAYPRSGVEQQSAAGSFLGAGGSGLTPAQILQVQSRLQFLRRPAGAAVATQPMKRQGVPLPQAPAVSKLYRGVRQRHWGKWVAEIRLPRNRTRLWLGTFDTAEEAALAYDSAAFRLRGDSARLNFPELRRGGQHLGPPLHAAVDAKLHAICNGTDVVVPLPQSRSNDATAAATATTAPSPFSSASPHVKSEPGSSGSDSSFSADGDVSSTGSSDVVLDMQLLDFSEAPWDDSESFGLRKYPSLEIDWDSILLIS

SEQ ID NO: 370 - DNA, 828 bp, Zea mays
atgactacggcggccatggataggcactggcgccgccttcaagctactccgccgccgctaggcgccgtgcagtactacagagagctaatccactccctagacaccccggtgcaagctgctccgatcatggtggacaccgagccgggccaagccatggctatcgtcggcgccagcagaagcaagtgctaccacctcatcacgccggcgcaggcggcctactactaccgcgtcgtaggcgggcgcctgggatcggcgccgcgcctgatgaagccgtaccgctgtctgggcgcgccggcaccctcgacgacgacgacgaagctgtaccgcggcgtgcgtcagcggcactggggcaagtgggtggcggagatcaggctgccgcggaaccggacgcgcctgtggctcggcacgtacgacaccgccgaggaggccgcgcttgcctacgacggcgccgcgttccggctgcgcggcgatgccgcccgcctcaacttcccggagcttcggctaggcggtacgcaccttgcgccgccgctccacccgaccgtcgatgccaagctccaagccgtgacgacatccgcgccagcggcgcctgccttgccccgacccgagagcctggatatcgagagcgagacctcgacgaccaccacggcaacggcgtacggcacaggcctctgtccatcatccaccggctcatcgtcgttggctaagacggcgccactgcccgatatgcaggagctcgacttctcggaggtgccgtgggatgagggcgacggcgtcgcgctctgcaagtacccgtcgttagaaatcgactggaacgccatcctctcatga

SEQ ID NO: 371 - protein, 275 aa, Zea mays
MTTAAMDRHWRRLQATPPPLGAVQYYRELIHSLDTPVQAAPIMVDTEPGQAMAIVGASRSKCYHLITPAQAAYYYRVVGGRLGSAPRLMKPYRCLGAPAPSTTTTKLYRGVRQRHWGKWVAEIRLPRNRTRLWLGTYDTAEEAALAYDGAAFRLRGDAARLNFPELRLGGTHLAPPLHPTVDAKLQAVTTSAPAAPALPRPESLDIESETSTTTTATAYGTGLCPSSTGSSSLAKTAPLPDMQELDFSEVPWDEGDGVALCKYPSLEIDWNAILS

SEQ ID NO: 372 - DNA, 831 bp, Zea mays
atggccgctgctataaatctccccgggcccagcgaggatctgatgcgagcgatggagtccttcatgcaagacgacgccccatcccctctggccatgccgccggcgccgtctttcccagcggccgcagcccagtacccggcgacccacctgagcccggcgcagatgcagttcatccaggcccagctccacttgcagcggaacccggggctgggcccgcgggcgcagcccatgaagcccgccgtcccagtgccgccggcgccggcgccgcagcggcctgtgaagctgtaccgcggcgtgcggcagcgtcactggggcaagtgggtggccgagatccggctcccccggaaccgcacccgcctgtggctcgggaccttcgacaccgccgagcaggcggcgctggcctacgaccaggcggcgtaccgcctccgcggggacgcggcgcggctcaacttccccgacaacgcggagtccagggcgccgctcgaccccgccgtggacgccaagctgcaggccatctgcgccaccatcgccgccgcgtcgtcgtcatccaagaattccaaggccaagagcaaggcgacgccaatcaacgcgtccgttctggaagcggcagcggcgtctccgagcaacagctcctccgacgaaggttccggctccgggttcgggtcggacgacgagatgtcctcgtcctccccgacgccggtggtggcgccgccggtggcggacatgggacagctggatttcagcgaggttccgtgggacgaggacgagagcttcgtgctccgcaagtacccgtcctacgagatcgactgggacgcgctgctctccaactag

SEQ ID NO: 373 - protein, 276 aa, Zea mays
MAAAINLPGPSEDLMRAMESFMQDDAPSPLAMPPAPSFPAAAAQYPATHLSPAQMQFIQAQLHLQRNPGLGPRAQPMKPAVPVPPAPAPQRPVKLYRGVRQRHWGKWVAEIRLPRNRTRLWLGTFDTAEQAALAYDQAAYRLRGDAARLNFPDNAESRAPLDPAVDAKLQAICATIAAASSSSKNSKAKSKATPINASVLEAAAASPSNSSSDEGSGSGFGSDDEMSSSSPTPVVAPPVADMGQLDFSEVPWDEDESFVLRKYPSYEIDWDALLSN

SEQ ID NO: 374 - DNA, 789 bp, Zea mays
atgcgagcgatggagtccttcatgcaagacgacgccccatcccctctggccatgccgccggcgccgtctttcccagcggccgcagcccagtacccggcgacccacctgagcccggcgcagatgcagttcatccaggcccagctccacttgcagcggaacccggggctgggcccgcgggcgcagcccatgaagcccgccgtcccagtgccgccggcgccggcgccgcagcggcctgtgaagctgtaccgcggcgtgcggcagcgtcactggggcaagtgggtggccgagatccggctcccccggaaccgcacccgcctgtggctcgggaccttcgacaccgccgagcaggcggcgctggcctacgaccaggcggcgtaccgcctccgcggggacgcggcgcggctcaacttccccgacaacgcggagtccagggcgccgctcgaccccgccgtggacgccaagctgcaggccatctgcgccaccatcgccgccgcgtcgtcgtcatccaagaattccaaggccaagagcaaggcgacgccaatcaacgcgtccgttctggaagcggcagcggcgtctccgagcaacagctcctccgacgaaggttccggctccgggttcgggtcggacgacgagatgtcctcgtcctccccgacgccggtggtggcgccgccggtggcggacatgggacagctggatttcagcgaggttccgtgggacgaggacgagagcttcgtgctccgcaagtacccgtcctacgagatcgactgggacgcgctgctctccaactag

SEQ ID NO: 375 - protein, 262 aa, Zea mays
MRAMESFMQDDAPSPLAMPPAPSFPAAAAQYPATHLSPAQMQFIQAQLHLQRNPGLGPRAQPMKPAVPVPPAPAPQRPVKLYRGVRQRHWGKWVAEIRLPRNRTRLWLGTFDTAEQAALAYDQAAYRLRGDAARLNFPDNAESRAPLDPAVDAKLQAICATIAAASSSSKNSKAKSKATPINASVLEAAAASPSNSSSDEGSGSGFGSDDEMSSSSPTPVVAPPVADMGQLDFSEVPWDEDESFVLRKYPSYEIDWDALLSN

SEQ ID NO: 376 - DNA, 894 bp, Zea mays
atggcggctacgacgatagattggcacggccgcaacgccgccttgtatggcgtgccggacagcaaggagctggtgcgcgcgctggctccgcccatgcagcaggccccgaccatctcgttcgcgtacccctgcccaggcgtggagcagcagagccagtgcgcggcggcgggctcgtttctgggcgccggcggcctgaccccggcgcagcttctccaggtgcagtcgcggctccggttcctgcgccggccggcggcagcgggcggcgccgcgcagccgatgaagcggcagggcgtgccgcagcaggctccgcttcccgcgcggccggcggtgtccaagctgtaccgcggcgtccggcagcggcattggggcaagtgggtggcggagatccgcctgccgcgcaaccgcacccgcctctggctcggcaccttcgacaccgccgaggaggccgcgctcgcctacgacggcgccgcgttccgcctccgcggggactccgccaggctcaacttccccgagctcaggcgcggcgggcagcacctcggcccgccgctccacgccgcggtcgacgccaagctccacgccatctgcagcggcgcggacgtcggcgcgccgctgccgcagggccagagccagagccacgccacggcggcggcgactacagccaccccgagccccttctcctcggtgagcccacacgtcaagagtgagccgggctgctccgtctcagagagctcgttctctgcagacggcgacgtgtcctccactgggtcttccgacgtggtgccggagatgcagctgctcgacttctcggaagcgccatgggacgagtcagacagcttccaccttcgcaagtacccctccctggagatcgactgggactcgatactgatttcataa

SEQ ID NO: 377 - protein, 297 aa, Zea mays
MAATTIDWHGRNAALYGVPDSKELVRALAPPMQQAPTISFAYPCPGVEQQSQCAAAGSFLGAGGLTPAQLLQVQSRLRFLRRPAAAGGAAQPMKRQGVPQQAPLPARPAVSKLYRGVRQRHWGKWVAEIRLPRNRTRLWLGTFDTAEEAALAYDGAAFRLRGDSARLNFPELRRGGQHLGPPLHAAVDAKLHAICSGADVGAPLPQGQSQSHATAAATTATPSPFSSVSPHVKSEPGCSVSESSFSADGDVSSTGSSDVVPEMQLLDFSEAPWDESDSFHLRKYPSLEIDWDSILIS

SEQ ID NO: 378 - protein, 50 aa, Artificial sequence
  motif 13
  VARIANT (22)..(22): / replace = "Lys"
  VARIANT (37)..(37): / replace = "Asp"
  VARIANT (41)..(41): / replace = "Ala"
  VARIANT (44)..(44): / replace = "Gln"
  VARIANT (47)..(47): / replace = "Phe"
  VARIANT (48)..(48): / replace = "Lys"
KLYRGVRQRHWGKWVAEIRLPRNRTRLWLGTFDTAEEAALTYDKAAYRLR

SEQ ID NO: 379 - protein, 21 aa, Artificial sequence
  motif 14
  VARIANT (1)..(1): / replace = "His" / replace = "Ala"
  VARIANT (2)..(2): / replace = "Leu" / replace = "Ser"
  VARIANT (3)..(3): / replace = "Arg" / replace = "Ala"
  VARIANT (4)..(4): / replace = "Lys" / replace = "Pro"
  VARIANT (7)..(7): / replace = "His"
  VARIANT (8)..(8): / replace = "Ser"
  VARIANT (9)..(9): / replace = "Ala" / replace = "Thr"
  VARIANT (15)..(15): / replace = "Glu"
  VARIANT (19)..(19): / replace = "Gln"
  VARIANT (20)..(20): / replace = "Ser" / replace = "Asn"
  VARIANT (21)..(21): / replace = "Leu" / replace = "Met"
GEYGPLDASVDAKLQAICDTI

SEQ ID NO: 380 - protein, 7 aa, Artificial sequence
  motif 15
  VARIANT (3)..(3): / replace = "Tyr" / replace = "Val" / replace = "Trp" / replace = "Leu"
PSYEIDW

SEQ ID NO: 381 - DNA, 2194 bp, Oryza sativa; identical to SEQ ID NO: 201

SEQ ID NO: 382 - DNA, 1264 bp, Oryza sativa; identical to SEQ ID NO: 276

SEQ ID NO: 383 - DNA, 2454 bp, Artificial sequence
  expression cassette with RCc3 promoter
tcgacgctactcaagtggtgggaggccaccgcatgttccaacgaagcgccaaagaaagccttgcagactctaatgctattagtcgcctaggatatttggaatgaaaggaaccgcagagtttttcagcaccaagagcttccggtggctagtctgatagccaaaattaaggaggatgccaaaacatgggtcttggcgggcgcgaaacaccttgataggtggcttaccttttaacatgttcgggccaaaggccttgagacggtaaagttttctatttgcgcttgcgcatgtacaattttattcctctattcaatgaaattggtggctcactggttcattaaaaaaaaaagaatctagcctgttcgggaagaagaggattttgttcgtgagagagagagagagagagagagagagagagagagagaaggaggaggaggattttcaggcttcgcattgcccaacctctgcttctgttggcccaagaagaatcccaggcgcccatgggctggcagtttaccacggacctacctagcctaccttagctatctaagcgggccgacctagtagccacgtgcctagtgtagattaaagttgccgggccagcaggaagccacgctgcaatggcatcttcccctgtccttcgcgtacgtgaaaacaaacccaggtaagcttagaatcttcttgcccgttggactgggacacccaccaatcccaccatgccccgatattcctccggtctcggttcatgtgatgtcctctcttgtgtgatcacggagcaagcattcttaaacggcaaaagaaaatcaccaacttgctcacgcagtcacgctgcaccgcgcgaagcgacgcccgataggccaagatcgcgagataaaataacaaccaatgatcataaggaaacaagcccgcgatgtgtcgtgtgcagcaatcttggtcatttgcgggatcgagtgcttcacagctaaccaaatattcggccgatgatttaacacattatcagcgtagatgtacgtacgatttgttaattaatctacgagccttgctagggcaggtgttctgccagccaatccagatcgccctcgtatgcacgctcacatgatggcagggcagggttcacatgagctctaacggtcgattaattaatcccggggctcgactataaatacctccctaatcccatgatcaaaaccatctcaagcagcctaatcatctccagctgatcaagagctcttaattagctagctagtgattagctgcgcttgtgatcatttaaatcaactagggatatcacaagtttgtacaaaaaagcaggctatggcagctgctatagaaggaaatctgatgcgggcgctgggagaggctccgtcgccgcagatgcagaagatcgcgccgccgccgtttcatcccggcttgccgccggcgccggcgaacttctcctcggccggagtccacgggttccactacatgggcccggcccagctcagcccggcccagatccagcgcgtccaggcccaactccacatgcagcggcaggcccagtcggggctcggcccgcgggcccagcccatgaagcccgcttcggcggctgctccggcggcggcggcggcgcgggcgcagaagctgtaccgcggcgtgcggcagcggcactggggcaagtgggtggcggagatccggctgccgcgcaaccgcaccaggctctggctcggcaccttcgacaccgccgaggaggcggcgctcacctacgaccaggccgcgtaccgcctccgcggcgacgcggcgcggctcaacttcccggacaacgccgcgtcgcggggcccgctcgacgccgccgtggacgccaagctccaggccatctgcgacaccatcgccgcgtccaagaacgcctcatccaggtccaggggcggcgccggcagggccatgcccatcaacgcgcccctggtcgccgcggcgtcgtcgtcctccggctccgaccactccggcggcggcgacgacggcggctcggagacgtcgtcgtcgtctgcggcggcgtcgccgctggcggagatggagcagctggacttcagcgaggtgccgtgggacgaggcggaggggttcgcgctcaccaagtacccgtcgtacgagatcgactgggactcgctgctcaacaacaataactagacccagctttcttgtacaaagtggtgatatcacaagcccgggcggtcttctagggataacagggtaattatatccctctagatcacaagcccgggcggtcttctacgatgattgagtaataatgtgtcacgcatcaccatgggtggcagtgtcagtgtgagcaatgacctgaatgaacaattgaaatgaaaagaaaaaaagtactccatctgttccaaattaaaattggttttaaccttttaataggtttatacaataattgatatatgttttctgtatatgtctaatttgttatcatcc

SEQ ID NO: 384 - DNA, 2361 bp, Oryza sativa
atgaacggcgagcttaaacttatggcttcctatgtgagcaagcttaagttcatcttgcaaaaagatcagcagcaggagccccatactgcgaaccttctagtcctacttgggagtagcaatcaggacaaaagaaatggcctctcacagggagaaaacagaatggacacttgtaccagaaagaagccaagaagataccaactcctcaccatgcaacaaaaagaaacgcttaatcgtgcatttcaatcatgtccgaaccctgatagaaatgacttgaagaagttggccaaggaactaaacatgactgagacccaaatcaaatattggttccagaactgcaggacaaagatgaagaaattcaagaacaatgaggagcgcaaactactgcagaaggagaatgaggagctaaagaaggagaatgcagagttgagaaataggatgaagaactcaacatgccgcgcttgtgacctccctttgttccatatagattgccgtcattgggagaatccaatgctcaacaagggtaatcatggcgttacaagtaatctcattcctcaggcagtgtcatccttgctccccagctcaagtggttttgtagcttcaggctccaatcttagtagcaatgctgtgctcatgcccgtatctgccatgccatcatcagttttgcagcctgctccagccgtctctggtgccaattttcccatcttgcacaatctatctgccaatgcaaatgatggctatacggaaaaaaacgtacttcttgatctggcgaaccgtgcaatggaagagttctttagtctaatgaaggagaatgagtctcttcttgtcaaaaaaaaggagaatgggcctctctggctcccacacatggatattctgggagtcgaatcacttaactaccaggaataccttgcaaaatccaggacgattggacaaaaacctgttgacttcaaagtggtcgtcaccagggacactgccattgtcaatggtagctgtgttgacctcgtcaaaagccttttggatgctaaccgctggagagagttgtttccaggcatcgtggcaagtgcaaacaccaccaagatcatctctactgggccctctaacttgcacgacgggttgcttcaattgatgcgtgcagagctccaggtaatgtcacctgaagtcccagtttgcgatgtgacattcttgaggcagagtgtgcagtttggaagtggactgtggtgtgtggttgatgtgtctattgataccatccttcctggagagagtaaaacagctcagtccagtgtgcagaccagcagtacagctgccagacgcatggaagtcaggctgttgccatcaggctgtgttattgaagaaatggagaatggctattccaaggtgacctggatggtgcatgcagcttatgatgagagagcagtgccagtgctttatcattcacttctccgctctgcaaaagcccttggtgcgtgccgctgggtagcatcactccagagacacagccagttcctttccggcctgcacaaatacatcttttgtcctgacagcacaatgacagaagtggtgatgcgaagaaaagtcctgtacctggtgaagcagatgacgagcagcttcacaggcctatttgcgtcgatgtctaaggccacgctgcaagatggtgatgatactcacttcgcgcatcagatagttggtggtgcaacaggtgaacctgccggactgctgctgagcgccaccacaaccatatggctccccggcgtgaacccgaggcacgtgtatgaccacctgcgtgatgagcagtgccatggtgaatggcgctgcctcctcggtgagcagctgcatcagggcaatgccttgccgtatggtgcccccctgaatggtgagaccgtgccagagttctatcgcatggtgaacgggctgcatgaagggcatgctatctccctgatcagccccagagaaatgggtggtaacataagcaacactctgctcctgcaagaggcaagaactgatctttctggctccctcatagtttacgccaggacagatgtgaacaccgtgcattccatcatgaacagtggcctcaaccctgccaccgtcttcctcgtatcctctggatgtgccattcttcctgattgcctggaatcattccctctacacccagctgcaactgcagatcaggccggcacctccagtgccgctatcgctagcaggagcgaaaccggtgggtcattcgtcaccgtcacttaccagatgtttttcagcagccaaggtggcgcagcacctgccagctcatcaattcatcaaggccgtgatgcgctcaagaaagccaccgacattttcaaggtggtcctcgacactctcaccgtggcatag

SEQ ID NO: 385 - protein, 786 aa, Oryza sativa
MNGELKLMASYVSKLKFILQKDQQQEPHTANLLVLLGSSNQDKRNGLSQGENRMDTCTRKKPRRYQLLTMQQKETLNRAFQSCPNPDRNDLKKLAKELNMTETQIKYWFQNCRTKMKKFKNNEERKLLQKENEELKKENAELRNRMKNSTCRACDLPLFHIDCRHWENPMLNKGNHGVTSNLIPQAVSSLLPSSSGFVASGSNLSSNAVLMPVSAMPSSVLQPAPAVSGANFPILHNLSANANDGYTEKNVLLDLANRAMEEFFSLMKENESLLVKKKENGPLWLPHMDILGVESLNYQEYLAKSRTIGQKPVDFKVVVTRDTAIVNGSCVDLVKSLLDANRWRELFPGIVASANTTKIISTGPSNLHDGLLQLMRAELQVMSPEVPVCDVTFLRQSVQFGSGLWCVVDVSIDTILPGESKTAQSSVQTSSTAARRMEVRLLPSGCVIEEMENGYSKVTWMVHAAYDERAVPVLYHSLLRSAKALGACRWVASLQRHSQFLSGLHKYIFCPDSTMTEVVMRRKVLYLVKQMTSSFTGLFASMSKATLQDGDDTHFAHQIVGGATGEPAGLLLSATTTIWLPGVNPRHVYDHLRDEQCHGEWRCLLGEQLHQGNALPYGAPLNGETVPEFYRMVNGLHEGHAISLISPREMGGNISNTLLLQEARTDLSGSLIVYARTDVNTVHSIMNSGLNPATVFLVSSGCAILPDCLESFPLHPAATADQAGTSSAAIASRSETGGSFVTVTYQMFFSSQGGAAPASSSIHQGRDALKKATDIFKVVLDTLTVA

SEQ ID NO: 386 - DNA, 1834 bp, Medicago truncatula
atgcaacgagcaagtgaccttcctgcagtctcaatatttattgcgaataaaatcattgatcgtgcacgttcagctatgaacgaactgtgcaaaataggaattgcagaaaacaatgtatggcatcaacatagggaacataggtacgaaattctcgatgattttgaatatttgaaacaatttggctgtgttgatgcaacattattggagattgttaagttggttgaagttggagagcttcaaactttacctagttttgatttgtgtcgaaaccaaaattcaatgtatacaatggaagtttttgaacaaggtttgcagattgaagcttctcgggacaaggcattgattaagataagtccaactaaactagttgaattacttatggatgtgaatcaatggtcgacggcattttacaacattgtctcaggagcaaggattctaggaagcatagaaggaagctatgatgaaaaaatgcatgtgatgagtgcagaatttcatttaccaagtcctgttataccaactcggaagtgtgtttttgcaagatatagcaaacaattcactcataacatatgggctgttgttgatgtatctttggaggacattttacaatctccttctaacaattttcataaaagaccttctggctgtttgattgaaggaatgcccgatggaaactccaaggttatatggttggagcacgtggaagcagactatagtaaattgagtgatctttttaggccattagttacctcagctttggcttttggtgcaacacgttggctaacttccattgtccgatacattgagtggtctgaaacactgaaggctccaaaacttattgcagatgctggagttcttataccacaaattgggaggacaagtttcttgaaattggccgatagaatgatgagaagattctgtgccaatcttggttccaccactaagaatccatggattcgactagctcctcttcctgctggttcagcagatattagagttatgattgcaaatgatatggctggtagtacaaatgagcctattggaacatcactgtttttttgtactactctttggcttaatgtctccccaaatcgattattcaacttccttcggcatgagaaatccagaagcaagtgggataaacattcacaaaacctttctattcgagaattcgcatgcattctcaccggcaaacatccagagaatcgtgtttctttgcttagagcaagggacaagaatgaaatattttacctacaagagagttacaaagatacaacagcttcctacgtgatttattgtcctttagacgagcaaaagttgacacatcttgcaactggatcgaacccagacgatgtagttgcttttccatcagggtttgctattatcccaggagggttaccaagagatggtgataaaggaaaaggaaatgccaacagtactgctaacgatgaaagtcttctaactatctcatttcatatcattggtaaagccaacaatgctgcatcaatccctccggaatcagttcaaaccatctataacatggttacagaaacaatggctgctataaaagatgcagtgtcgtatcatagtcgactcaacaactgggatcaagatgaagtggcaaatagcttggcagcatagtagtttagaacaatatatacattctccctcatttttttgttgtcccttgctaaagtcataaatattgtgctggatttcatacaaattttacgaccatatgattgttgatattaatgtatttattttatatgtggaataaacaattaatttccttgttaaactatgttttgttaactatgcataggttgaattgttg

SEQ ID NO: 387 - protein, 545 aa, Medicago truncatula
MQRASDLPAVSIFIANKIIDRARSAMNELCKIGIAENNVWHQHREHRYEILDDFEYLKQFGCVDATLLEIVKLVEVGELQTLPSFDLCRNQNSMYTMEVFEQGLQIEASRDKALIKISPTKLVELLMDVNQWSTAFYNIVSGARILGSIEGSYDEKMHVMSAEFHLPSPVIPTRKCVFARYSKQFTHNIWAVVDVSLEDILQSPSNNFHKRPSGCLIEGMPDGNSKVIWLEHVEADYSKLSDLFRPLVTSALAFGATRWLTSIVRYIEWSETLKAPKLIADAGVLIPQIGRTSFLKLADRMMRRFCANLGSTTKNPWIRLAPLPAGSADIRVMIANDMAGSTNEPIGTSLFFCTTLWLNVSPNRLFNFLRHEKSRSKWDKHSQNLSIREFACILTGKHPENRVSLLRARDKNEIFYLQESYKDTTASYVIYCPLDEQKLTHLATGSNPDDVVAFPSGFAIIPGGLPRDGDKGKGNANSTANDESLLTISFHIIGKANNAASIPPESVQTIYNMVTETMAAIKDAVSYHSRLNNWDQDEVANSLAA

SEQ ID NO: 388 - DNA, 2049 bp, Arabidopsis thaliana
atgaatggcgatcttgaagttgatatgtctagaggagatttcaatccaagtttttttcttggaaagcttaaagacgatgagtttgagagtagatcattgagtgatgatagctttgatgcaatgtctggtgatgaggataaacaagaacaacgccctaagaagaagaagaggaagacaaagtatcatagacacacttcttaccagattcaagaactcgaatctttcttcaaagagtgtcctcatcctaatgagaagcaaaggttggaacttggcaaaaaacttactttggagagtaagcaaattaagttttggtttcagaacagaagaacacaaatgaagacgcaactagagcggcatgagaatgtgattctcaaacaagagaatgaaaaactgcggctagaaaacagtttccttaaagagtcaatgagaggctctctatgtattgattgtggtggagcagttatacctggtgaggtttcttttgagcagcaccaacttaggattgagaatgctaagcttaaggaagagcttgataggatttgtgctttagcaaatagattcattggtgggtctatttcacttgagcagccttcaaatggtgggattggctcacagcatttgcctataggacattgtgtcagtggtggaacttcactgatgtttatggatcttgccatggaagccatggatgagttgttgaagttagcagaattggaaacttctttatggagttcaaagagtgagaaaggatcgatgaaccatttccctggttcaagagaaactggtttagtacttatcaatagcttggctctagtcgagactcttatggacacgaacaaatgggcagaaatgtttgagtgcatagtcgcggttgcatcaacccttgaagtgatatccaacggtagtgatggatcaagaaacggctctattctattgatgcaagcagagtttcaagtgatgtctccattagttccaatcaaacaaaagaagtttcttagatattgcaagcaacatggagatggtttatgggcggtcgtcgatgtttcttatgatataaacagaggaaatgagaacttgaagtcttatggtggctctaaaatgtttccttcaggatgcattatacaagacataggcaacggctgctccaaggtgacatggatagaacattcagagtacgaagagagtcacacccactcactttaccaaccgttgctcagttcttcggttgggttaggcgcaaccaaatggcttgcgactctgcagaggcaatgcgagagcttcacaatgcttttgtcttctgaagatcacacaggtttgtcacatgctggaacaaagagtatactaaagctagcgcagcgtatgaagctcaacttttactcgggaataactgcttcgtgcattcacaaatgggagaagcttcttgctgagaacgtgggacaggacacaaggatactgacaaggaagagtcttgagccgtctggtattgtcctgagcgctgcgacatctctgtggctaccagtgactcagcagagactctttgagtttctgtgtgatggtaaatgcagaaaccagtgggatattttgtctaatggtgcttcaatggaaaacacacttctcgtcccaaaaggacaacaggaaggaagctgcgtctctcttcttcgtgctgctgggaatgatcaaaatgagagtagtatgctcatcttgcaagagacatggaatgacgtttctggtgcactggtggtttacgcgcctgttgatattccatctatgaatactgtaatgagcggtggagattcagcttatgtggcgcttcttccatcggggttctcgatattgcctgacggatcatcatcatcgtctgatcagttcgataccgatggcggtttggtgaatcaagaaagcaaaggatgtctcctgactgtaggatttcagatcttagtgaacagcctaccgactgcaaaactcaacgtggaatctgttgaaactgttaacaacctcatcgcttgcaccattcacaagatcagagccgctcttcgtatacctgcttag

SEQ ID NO: 389 - protein, 682 aa, Arabidopsis thaliana
MNGDLEVDMSRGDFNPSFFLGKLKDDEFESRSLSDDSFDAMSGDEDKQEQRPKKKKRKTKYHRHTSYQIQELESFFKECPHPNEKQRLELGKKLTLESKQIKFWFQNRRTQMKTQLERHENVILKQENEKLRLENSFLKESMRGSLCIDCGGAVIPGEVSFEQHQLRIENAKLKEELDRICALANRFIGGSISLEQPSNGGIGSQHLPIGHCVSGGTSLMFMDLAMEAMDELLKLAELETSLWSSKSEKGSMNHFPGSRETGLVLINSLALVETLMDTNKWAEMFECIVAVASTLEVISNGSDGSRNGSILLMQAEFQVMSPLVPIKQKKFLRYCKQHGDGLWAVVDVSYDINRGNENLKSYGGSKMFPSGCIIQDIGNGCSKVTWIEHSEYEESHTHSLYQPLLSSSVGLGATKWLATLQRQCESFTMLLSSEDHTGLSHAGTKSILKLAQRMKLNFYSGITASCIHKWEKLLAENVGQDTRILTRKSLEPSGIVLSAATSLWLPVTQQRLFEFLCDGKCRNQWDILSNGASMENTLLVPKGQQEGSCVSLLRAAGNDQNESSMLILQETWNDVSGALVVYAPVDIPSMNTVMSGGDSAYVALLPSGFSILPDGSSSSSDQFDTDGGLVNQESKGCLLTVGFQILVNSLPTAKLNVESVETVNNLIACTIHKIRAALRIPA

SEQ ID NO: 390 - DNA, 2232 bp, Arabidopsis thaliana
atgtaccatccaaacatgtttgagagccatcatatgttcgatatgaccccaaagagtacctctgataacgacttgggaatcaccggtagccgagaagatgactttgagaccaagtcaggtaccgaagtcactactgagaatccttctggtgaagagcttcaagatcctagccaacgtcccaacaaaaagaagcgttaccatcgccacacgcaacgccaaattcaagagctcgaatcattctttaaggaatgtcctcatccagatgataagcaacgaaaagagttgagccgtgatctcaatttagagcctcttcaagttaagttttggttccaaaacaaacgcacacagatgaaggcacaaagtgagaggcatgagaaccagattctaaagtcagacaatgacaagctcagagcagagaacaatagatacaaagaagctctaagcaatgctacatgccctaactgtggcggtccagctgctattggagaaatgtcttttgacgaacaacatctcaggatcgaaaatgctcggctccgcgaagagattgataggatctctgctattgctgcgaaatacgttgggaagccgttaggatcgtctttcgctccactagcgatccacgcgccttctcgttcgcttgatcttgaagttggaaactttgggaaccagacaggctttgtaggagaaatgtatggaacaggggacattttgaggtcagtttcgattccttctgagactgataagcctataatcgtggagctagcggttgcagctatggaggaactcgtgagaatggctcaaactggagatcctttatggctttcaaccgataattcagtcgagattctcaacgaagaagagtatttcagaacgtttccgagaggaattggaccaaagccattaggattaagatcagaggcgtcaagacaatctgcagttgttataatgaatcacatcaatctcgttgagattctcatggatgtgaatcaatggtcttgtgttttctctgggattgtgtcaagagccttgacacttgaagttctttcaactggagttgctgggaactacaacggtgctttacaagtgatgacagctgagtttcaagttccatcacccctagtcccaacgcgtgagaactactttgtgagatactgcaaacaacacagtgacggctcttgggctgtggttgatgtctctttggacagccttagaccaagtactccaatcttaagaactagaagaaggccttcaggttgtctgattcaagaattgcctaatggttattctaaggttacatggatagagcatatggaggtagatgatagatcagttcacaacatgtataaaccgttggttcagtccggtttagctttcggtgcgaaacgttgggtggctacactcgaacgacaatgcgagcggcttgctagctccatggccagcaacattcctggtgatctttccgtgataacgagtcctgaaggaaggaagagtatgttgaagctagctgagagaatggttatgagtttctgcagtggtgttggcgcgtcgactgcacacgcttggacaacaatgtcgacaacaggatccgatgatgttcgggtcatgacccgcaagagtatggatgatccaggaagacctccgggtattgttcttagtgcagctacttcattctggatcccagttgctcccaaacgtgtttttgatttcctccgtgacgaaaattcaagaaaagagtgggatattctgtcaaatggaggtatggttcaggaaatggctcatatagccaatggtcatgaacctggaaactgtgtctccttgctccgagtcaatagtggaaactcgagccagagcaacatgttgattctacaagagagctgtacagatgcatcaggatcgtatgtgatttacgcgccagtggatatagtggcgatgaatgtggttctaagcggtggagatcctgattacgtggcgttgttgccgtctggttttgctattttaccggatggttcggttggaggaggagatgggaatcagcatcaggaaatggtttctactacttcttctgggagttgtggtggttcgcttttaaccgttgcgtttcagattcttgttgactctgttcctacagctaaactctcacttggctcggtggctacggttaatagtctgatcaaatgtacggtggagaggattaaagctgctgtttcttgtgatgttggaggaggagcgtag

SEQ ID NO: 391 - protein, 743 aa, Arabidopsis thaliana
MYHPNMFESHHMFDMTPKSTSDNDLGITGSREDDFETKSGTEVTTENPSGEELQDPSQRPNKKKRYHRHTQRQIQELESFFKECPHPDDKQRKELSRDLNLEPLQVKFWFQNKRTQMKAQSERHENQILKSDNDKLRAENNRYKEALSNATCPNCGGPAAIGEMSFDEQHLRIENARLREEIDRISAIAAKYVGKPLGSSFAPLAIHAPSRSLDLEVGNFGNQTGFVGEMYGTGDILRSVSIPSETDKPIIVELAVAAMEELVRMAQTGDPLWLSTDNSVEILNEEEYFRTFPRGIGPKPLGLRSEASRQSAVVIMNHINLVEILMDVNQWSCVFSGIVSRALTLEVLSTGVAGNYNGALQVMTAEFQVPSPLVPTRENYFVRYCKQHSDGSWAVVDVSLDSLRPSTPILRTRRRPSGCLIQELPNGYSKVTWIEHMEVDDRSVHNMYKPLVQSGLAFGAKRWVATLERQCERLASSMASNIPGDLSVITSPEGRKSMLKLAERMVMSFCSGVGASTAHAWTTMSTTGSDDVRVMTRKSMDDPGRPPGIVLSAATSFWIPVAPKRVFDFLRDENSRKEWDILSNGGMVQEMAHIANGHEPGNCVSLLRVNSGNSSQSNMLILQESCTDASGSYVIYAPVDIVAMNVVLSGGDPDYVALLPSGFAILPDGSVGGGDGNQHQEMVSTTSSGSCGGSLLTVAFQILVDSVPTAKLSLGSVATVNSLIKCTVERIKAAVSCDVGGGA

SEQ ID NO: 392 - DNA, 1713 bp, Arabidopsis thaliana
atgaacttcggtagtctcttcgataacacacccggtggtggctctaccggagcaagacttctctccggtttaagttatggcaaccacaccgccgcaactaacgtcttacccggtggtgctatggctcaagcggcagcggctgctagtctcttctctcctcctctaacgaaatctgtttacgcttcttctggcctctctctagccctcgagcaaccggagagaggaaccaaccgtggagaagcatcgatgaggaacaataataacgtcggaggaggaggcgatactttcgatgggagtgtgaacagaagaagccgagaagaagaacatgagagtagatctggtagtgataacgttgaaggtatctccggtgaagatcaagacgctgctgataagcctcctcggaagaaacgttatcaccgacacactcctcaacaaatccaagaactcgaatctatgttcaaagagtgtccgcatccagacgagaaacaaagattagaactaagtaagagactttgcttagagacaagacaagtcaagttctggttccagaatcgtcgcactcagatgaagactcaattagagaggcatgagaacgcgttattgagacaagagaacgataagttaagagctgagaacatgtctattcgtgaagcaatgaggaatccaatctgcaccaattgtggtggacctgccatgcttggtgatgtctctcttgaagaacatcatctccgtatcgaaaacgctcgtttaaaagacgagcttgatcgtgtctgtaacctcaccggtaagttccttggccaccaccataatcaccactacaactcctccttagaactcgctgtcggcaccaacaacaacggtggacatttcgctttccctcctgatttcggcggtggtggtggttgcttacctccgcagcagcagcagtcgacggtgattaatgggattgatcagaagtcagttttgctggagctggctttaactgctatggatgagttagtgaagcttgctcagagtgaagaaccgttatgggtcaaaagcttggacggtgagagagacgagcttaaccaagatgagtacatgagaacattttcatctactaaaccaaccggtttagctactgaagcttctagaacctctggtatggtcatcatcaatagcttagctctcgtcgagactttaatggactccaatcggtggacggagatgttcccgtgtaacgtcgcaagagctacaaccaccgacgttatatccggtgggatggctggaacaataaatggtgcacttcaactgatgaatgcagagctacaagttttgtctccactggttccggttcgtaatgttaatttcctccggttctgcaaacagcacgcggagggtgtgtgggcggtggtggatgtatcaattgatcctgtcagggaaaactctggtggtgccccggtaatccggcgactaccatcaggatgtgtggtgcaggatgtgtctaatggatactctaaggtcacgtgggtggagcatgcagaatacgacgagaaccaaatccaccagctgtacaggccgttgctacggtcaggccttggttttggctctcaaagatggctcgctacacttcagagacagtgcgagtgtctcgccatcctcatttcttcctccgttacatctcacgacaacacatgtccgtttcttacacacttgtcattatgcttaacataa

SEQ ID NO: 393 - protein, 570 aa, Arabidopsis thaliana
MNFGSLFDNTPGGGSTGARLLSGLSYGNHTAATNVLPGGAMAQAAAAASLFSPPLTKSVYASSGLSLALEQPERGTNRGEASMRNNNNVGGGGDTFDGSVNRRSREEEHESRSGSDNVEGISGEDQDAADKPPRKKRYHRHTPQQIQELESMFKECPHPDEKQRLELSKRLCLETRQVKFWFQNRRTQMKTQLERHENALLRQENDKLRAENMSIREAMRNPICTNCGGPAMLGDVSLEEHHLRIENARLKDELDRVCNLTGKFLGHHHNHHYNSSLELAVGTNNNGGHFAFPPDFGGGGGCLPPQQQQSTVINGIDQKSVLLELALTAMDELVKLAQSEEPLWVKSLDGERDELNQDEYMRTFSSTKPTGLATEASRTSGMVIINSLALVETLMDSNRWTEMFPCNVARATTTDVISGGMAGTINGALQLMNAELQVLSPLVPVRNVNFLRFCKQHAEGVWAVVDVSIDPVRENSGGAPVIRRLPSGCVVQDVSNGYSKVTWVEHAEYDENQIHQLYRPLLRSGLGFGSQRWLATLQRQCECLAILISSSVTSHDNTCPFLTHLSLCLT

SEQ ID NO: 394 - DNA, 2244 bp, Arabidopsis thaliana
atgtcaatggccgtcgacatgtcttccaaacaacccaccaaagactttttctcctctccagccctctctctatctctcgctgggatattccggaatgcatcctccggcagcaccaaccctgaggaggatttcctgggcagaagagtagttgacgatgaggatcgcactgtggagatgagcagcgagaactcaggacccacgagatccagatcagaggaggatttggagggtgaggatcacgacgatgaggaggaggaagaggaggacggcgcagctggaaacaagggcactaataagagaaagaggaagaagtatcatcgtcacaccaccgatcagatcagacacatggaagcgctattcaaagagacaccacatccggacgagaagcaaagacagcagctgagcaagcaactagggctggcccctcgccaggtcaagttctggttccaaaaccgccgcacacagatcaaggctattcaagaacggcacgagaactccctgctcaaggcggaactagagaagctgcgagaggaaaacaaagccatgagggagtctttttccaaggctaattcctcctgccccaactgcggaggaggccccgatgatctccacctcgaaaactccaaactgaaagccgagctcgataagcttcgtgcagctcttggacgcactccctatcccctgcaggcttcatgctccgacgatcaagaacaccgtctcggctctctcgatttctacacgggcgtctttgccctcgagaagtcccgtattgccgagatttctaaccgagccacccttgaactccagaagatggccacctcaggcgaacctatgtggctccgcagcgttgagactggccgtgagattctcaactacgatgagtacctcaaggagtttccccaagcgcaagcctcttcgtttcctggaaggaaaaccatcgaagcatctagagatgcggggattgtgtttatggacgcacataaacttgcccagagtttcatggacgtgggacaatggaaagagacatttgcatgcttgatctcaaaggctgcaacggtcgatgttatccggcaaggcgaagggccttcacggatcgacggggctattcagctgatgttcggagagatgcagctgctcactccggtcgtccccacaagagaagtgtacttcgtgagaagctgccggcagctgagccctgagaaatgggcaatagtggacgtctcggtctccgtggaggacagcaacacggagaaggaggcttctcttctgaaatgtcgaaaactcccctccggttgcatcatcgaggacacctccaacggtcactccaaggtcacctgggtggagcacctcgacgtgtctgcatccacagttcagcctctcttccgctccttagtcaacaccggtttggcctttggggctcgacactgggtcgccacccttcagctccattgcgaacgccttgtcttcttcatggctaccaacgtccccaccaaagactctctcggagttacaactcttgccgggagaaagagtgtgctgaagatggctcagagaatgacacaaagcttctaccgcgccattgctgcatcaagctaccatcaatggaccaaaatcaccaccaaaactggacaagacatgcgggtttcttccaggaagaaccttcatgatcctggcgagcccacgggagtcattgtctgcgcttcttcttcgctgtggttacctgtttctccagctcttctcttcgatttctttagagatgaagctcgtcggcatgagtgggatgctttgtcaaacggagctcatgttcagtctattgcaaacttatccaagggacaagacagaggcaactcagtggcaatccagacagtgaaatcgagagaaaagagcatatgggtgctgcaagacagcagcactaactcgtatgagtcggtggtggtatacgctcccgtagatataaacacgacacagctggtgctcgcgggacatgatccaagcaacatccaaatcctcccctctggattctcaatcatacctgatggagtagagtcacggccactggtaataacgtctacacaagacgacagaaacagccaaggagggtcgctcctgacactcgccctccaaaccctcatcaacccttctcctgcagcaaagctgaatatggagtctgtggaatccgtgacaaacctcgtctcagtcacactacacaacattaagagaagtctacaaatcgaagattgctga

SEQ ID NO: 395 - protein, 747 aa, Arabidopsis thaliana
MSMAVDMSSKQPTKDFFSSPALSLSLAGIFRNASSGSTNPEEDFLGRRVVDDEDRTVEMSSENSGPTRSRSEEDLEGEDHDDEEEEEEDGAAGNKGTNKRKRKKYHRHTTDQIRHMEALFKETPHPDEKQRQQLSKQLGLAPRQVKFWFQNRRTQIKAIQERHENSLLKAELEKLREENKAMRESFSKANSSCPNCGGGPDDLHLENSKLKAELDKLRAALGRTPYPLQASCSDDQEHRLGSLDFYTGVFALEKSRIAEISNRATLELQKMATSGEPMWLRSVETGREILNYDEYLKEFPQAQASSFPGRKTIEASRDAGIVFMDAHKLAQSFMDVGQWKETFACLISKAATVDVIRQGEGPSRIDGAIQLMFGEMQLLTPVVPTREVYFVRSCRQLSPEKWAIVDVSVSVEDSNTEKEASLLKCRKLPSGCIIEDTSNGHSKVTWVEHLDVSASTVQPLFRSLVNTGLAFGARHWVATLQLHCERLVFFMATNVPTKDSLGVTTLAGRKSVLKMAQRMTQSFYRAIAASSYHQWTKITTKTGQDMRVSSRKNLHDPGEPTGVIVCASSSLWLPVSPALLFDFFRDEARRHEWDALSNGAHVQSIANLSKGQDRGNSVAIQTVKSREKSIWVLQDSSTNSYESVVVYAPVDINTTQLVLAGHDPSNIQILPSGFSIIPDGVESRPLVITSTQDDRNSQGGSLLTLALQTLINPSPAAKLNMESVESVTNLVSVTLHNIKRSLQIEDC

SEQ ID NO: 396 - DNA, 2178 bp, Arabidopsis thaliana
atgtctcagtcaaacatggtaccagtggctaacaacggagacaacaacaacgacaacgaaaacaacaacaacaacaacaacaatggtggaactgacaacactaatgctggaaatgattctggagatcaagatttcgacagtgggaatacctcaagtggcaatcatggagaagggttgggaaacaatcaagctcctcgtcataagaagaaaaaatacaatcgtcacacccaacttcagatttcggagatggaagctttcttcagagagtgtcctcacccagatgacaaacaaaggtacgaccttagcgctcaattgggattggaccctgttcagatcaaattctggttccagaacaaacgcactcaaaacaagaatcaacaagaacgctttgagaactcagaacttcggaatctgaacaaccaccttaggtctgaaaatcagcggttacgagaagctattcatcaagccttatgccctaagtgtggaggccaaactgcaattggcgaaatgaccttcgaagagcaccatcttcgcatcctcaacgctcgtttgactgaagagatcaagcaactttccgtgacagcggaaaagatatcaaggcttacggggataccagtaaggagccatccccgtgtgtctcctcctaatcctcctccaaatttcgagttcgggatgggatctaagggaaatgtcggaaaccactcgagggaaaccactggacctgcagatgctaataccaagccgatcatcatggagttggcatttggagccatggaggagctcttggtgatggctcaagtggctgaaccactgtggatgggaggatttaatggcactagcttagctttgaacttggatgaatacgaaaagacgtttcgcacgggtctcggtcctagacttggcgggtttcgaaccgaggcatccagggaaactgcactcgtggcaatgtgtcctactggcattgttgaaatgctcatgcaagagaatctgtggtcaacaatgtttgccggaattgttggtagagccaggactcatgaacagataatggctgatgctgctggaaacttcaatggaaatctccaaataatgagtgctgagtaccaagtgctttccccgctagtcacaacccgcgaaagctacttcgtccgctactgtaagcaacaaggagagggtttgtgggcggtggtcgatatttccatcgaccatctcctcccaaacatcaacctaaaatgtcgccgccgaccctctggatgtctgattcaagaaatgcatagtggttactccaaggttacatgggtggaacatgtggaagtagatgatgcaggaagttacagcatctttgagaaattaatctgtactggtcaagcttttgctgctaaccgctgggttggtacattggtacgccagtgtgagcggatatctagcatcttgtcgacagattttcaatctgtcgattccggtgatcacataacgctaactaaccatggaaagatgagcatgctgaagatagctgagcggattgcgagaaccttctttgctggaatgaccaatgcgacggggtctacaatattttctggtgttgaaggagaagatatcagagtgatgacaatgaagagcgtgaatgatccaggaaagcctcccggtgtcattatttgtgcagccacttccttttggcttcctgctcctcctaacactgtctttgacttcctcagagaggctactcaccgacacaattgggatgttctctgcaacggagagatgatgcacaagatagcagagattacgaatgggatagacaaaaggaactgtgcaagtttactccggcatggacacactagcaagagcaagatgatgatagttcaagagacttctactgacccaacagcttcatttgtgctttatgcgcctgttgatatgacatcaatggatattactctccatggaggtggtgatcctgactttgtggtgatcctgccttctggttttgctatttttccagatggtacgggtaagcctggaggaaaagaaggaggatcacttttgaccatttccttccaaatgctggttgagtcaggtcctgaggctaggctgagtgttagctctgttgcaactactgagaatctgattcgtacaaccgtgcggaggatcaaagatttgtttccttgtcagactgcttga

SEQ ID NO: 397 - protein, 725 aa, Arabidopsis thaliana
MSQSNMVPVANNGDNNNDNENNNNNNNNGGTDNTNAGNDSGDQDFDSGNTSSGNHGEGLGNNQAPRHKKKKYNRHTQLQISEMEAFFRECPHPDDKQRYDLSAQLGLDPVQIKFWFQNKRTQNKNQQERFENSELRNLNNHLRSENQRLREAIHQALCPKCGGQTAIGEMTFEEHHLRILNARLTEEIKQLSVTAEKISRLTGIPVRSHPRVSPPNPPPNFEFGMGSKGNVGNHSRETTGPADANTKPIIMELAFGAMEELLVMAQVAEPLWMGGFNGTSLALNLDEYEKTFRTGLGPRLGGFRTEASRETALVAMCPTGIVEMLMQENLWSTMFAGIVGRARTHEQIMADAAGNFNGNLQIMSAEYQVLSPLVTTRESYFVRYCKQQGEGLWAVVDISIDHLLPNINLKCRRRPSGCLIQEMHSGYSKVTWVEHVEVDDAGSYSIFEKLICTGQAFAANRWVGTLVRQCERISSILSTDFQSVDSGDHITLTNHGKMSMLKIAERIARTFFAGMTNATGSTIFSGVEGEDIRVMTMKSVNDPGKPPGVIICAATSFWLPAPPNTVFDFLREATHRHNWDVLCNGEMMHKIAEITNGIDKRNCASLLRHGHTSKSKMMIVQETSTDPTASFVLYAPVDMTSMDITLHGGGDPDFVVILPSGFAIFPDGTGKPGGKEGGSLLTISFQMLVESGPEARLSVSSVATTENLIRTTVRRIKDLFPCQTA

SEQ ID NO: 398 - DNA, 2061 bp, Arabidopsis thaliana
atgaatggacaaggtgatttggatgcggttggaaacattccaaaaccaggtgaagctgaaggcgatgagattgatatgattaatgatatgtctggtgttaatgatcaagatggtggaaggatgagaagaacccataggcgcactgcttatcaaactcaagaacttgaaaatttctacatggaaaatcctcatcccactgaagaacagaggtacgagcttggacaaaggcttaatatgggtgtcaatcaagtcaagaattggttccagaataaaagaaatctcgagaagatcaataatgaccaccttgagaatgtaactcttagagaagagcatgacagattgctagcaactcaggatcagcttagaagcgcaatgctacgtagtttatgcaacatttgtggtaaggcaactaattgtggagacactgaatatgaggtgcaaaaacttatggctgagaatgctaacttggagcgggagatagaccagttcaattccagatacctttctcatcccaaacaaaggatggtcagtacatccgaacaggcgccttcttcttcctctaatccaggaataaatgcaacaccagtacttgattttagtggtggaactaggacgtctgagaaggagacatcaatttttctgaatcttgccattacggctttgagagagttgattacattgggagaagtggactgtccattttggatgatagatccaatcgttagatccaaaggagtatcaaagatctatgagaagtatagaagttctttcaacaatgtcacaaaacctcccgggcaaattgtggaggcttcaagagctaaaggtttagttcccatgacttgcgtgactctggtcaagactcttatggacacaggcaaatgggtcaacgtgtttgcacctatagtccctgtggcatcaacccataaagtgctatctaccggttctggtggaaccaaaagtggctcactccaacagattcaagcagaatttcaagtaatttctccgctggtaccaaagagaaaagtaacgtttattagatactgcaaagagatcagacagggcttatgggtggtcgtcgacgttactcctactcaaaatccgactttgctgccctatggttgttctaagaggctaccctcaggccttatcatagacgacctgtccaatgggtactcccaggttacatggattgaacaagcggaatataatgagagtcacatccaccaactctaccagcctttgattggctatgggatcgggctaggtgcaaagagatggctcgcgacgctgcagagacactgcgaaagcctctcgaccctttcatctaccaacttgactgaaattagtccaggattgtctgcaaaaggtgcaactgaaatagtgaagctagcacagcgaatgactctcaactactacagaggtattacgagtccttcggtggacaagtggcagaaaattcaggtggagaatgtggcacaaaacatgagtttcatgatccgaaagaacgtgaatgagcctggtgagctaactgggattgtgctgagtgcatccacttctgtttggctcccagtgaaccagcatacactctttgctttcattagccacctgagtttcagacacgagtgggatatcttgaccaatgatactaccatggaagaaacaatccggattcaaaaagcaaaacgccatggaaacatcatctctcttctgaaaatcgttaataatggtatgctggttctgcaagagatttggaatgatgcatcaggtgcaatggtggtgtatgcaccagtggaaaccaattctattgagctggtcaagagaggtgaaaattcagattctgtgaagtttcttccttcgggattttcgatagtgccagatggagtaaatgggtcatatcatagaggcaatactggtggaggatgtctactgacatttggacttcagatcttggtgggcatcaatccaactgctgcactcattcaaggtactgtcaaaagtgtcgagacactcatggctcatactattgtcaagatcaaatccgcgttagatttacagacgtaa

SEQ ID NO: 399 - protein, 686 aa, Arabidopsis thaliana
MNGQGDLDAVGNIPKPGEAEGDEIDMINDMSGVNDQDGGRMRRTHRRTAYQTQELENFYMENPHPTEEQRYELGQRLNMGVNQVKNWFQNKRNLEKINNDHLENVTLREEHDRLLATQDQLRSAMLRSLCNICGKATNCGDTEYEVQKLMAENANLEREIDQFNSRYLSHPKQRMVSTSEQAPSSSSNPGINATPVLDFSGGTRTSEKETSIFLNLAITALRELITLGEVDCPFWMIDPIVRSKGVSKIYEKYRSSFNNVTKPPGQIVEASRAKGLVPMTCVTLVKTLMDTGKWVNVFAPIVPVASTHKVLSTGSGGTKSGSLQQIQAEFQVISPLVPKRKVTFIRYCKEIRQGLWVVVDVTPTQNPTLLPYGCSKRLPSGLIIDDLSNGYSQVTWIEQAEYNESHIHQLYQPLIGYGIGLGAKRWLATLQRHCESLSTLSSTNLTEISPGLSAKGATEIVKLAQRMTLNYYRGITSPSVDKWQKIQVENVAQNMSFMIRKNVNEPGELTGIVLSASTSVWLPVNQHTLFAFISHLSFRHEWDILTNDTTMEETIRIQKAKRHGNIISLLKIVNNGMLVLQEIWNDASGAMVVYAPVETNSIELVKRGENSDSVKFLPSGFSIVPDGVNGSYHRGNTGGGCLLTFGLQILVGINPTAALIQGTVKSVETLMAHTIVKIKSALDLQT

SEQ ID NO: 400 - DNA, 2427 bp, Arabidopsis thaliana
atgaatttcaacggttttctcgacgacggtgctggagcctcaaagctactctctgatgctccgtacaacaaccacttctctttctccgccgtagacaccatgctcggaagcgccgccattgctccttctcagtctcttcctttctcttcttcaggcctctctctcggactccaaacaaatggagaaatgagtagaaacggagagattatggagtcaaacgtaagtcgtaagagtagtagaggagaagatgtagaaagcagatctgaaagtgataacgctgaagctgtctccggtgacgatttagatacctccgatagacctttaaagaagaagaaacgttaccatcgtcacactcctaaacaaattcaagacctcgaatcggtttttaaagagtgtgcacatccagacgagaagcaacgtcttgatcttagccgtcgacttaacttagatcctcgtcaagtcaagttctggttccagaatcgtcgtactcagatgaagactcaaatcgaacgacatgagaatgctttgttgaggcaagagaacgataagcttcgagctgagaatatgtctgtacgcgaagctatgagaaaccctatgtgtggtaattgcggcggacctgccgttatcggtgagatctcaatggaagagcaacatctgagaattgaaaactctcgtctcaaagatgagttagaccgagtctgtgccttaaccggtaagtttcttggccggtctaatggttcacatcatataccggactcagcacttgttctcggcgttggtgttggttctggtggatgtaatgttggtggtggtttcactctctcttctccgctgttgcctcaagcttctcctagatttgagatttctaatggaaccggttctggtttggtggctacggttaaccgtcaacaaccggttagtgttagtgattttgatcagagatcgaggtatttggatttagctcttgcggctatggatgagcttgtgaagatggctcagacacgtgagccgctctgggttcgaagctcggattctggttttgaagtgctgaaccaggaagagtacgacacaagtttctctcggtgtgttggaccaaaacaagatgggtttgtctcagaagcttctaaagaagctggaactgttatcatcaatagcttagcgctcgttgaaaccttaatggactcggaacggtgggcggaaatgtttcctagtatggtctcaagaacttcaaccacagagattatctctagtggcatgggagggcgaaatggtgcacttcacctgatgcacgcagagcttcaactgctgtctccactcgtgccggttagacaagtgtcgttcttgcggttctgtaaacagcacgcggaaggtgtttgggcagtcgtggatgtctcaattgattccattagagaaggttcttcttcgagctgtagaagattaccatccggttgcctcgtacaagacatggccaatggctactcaaaggtaacatggatcgagcacacggagtatgacgaaaaccacatccaccgtttataccgcccattactcaggtgcggtctagcgtttggtgcgcatcgatggatggctgcattacaacgtcaatgcgaatgcctcacgattctcatgtcctccactgtttccacttccactaatccatcccctataaactgcaatgggagaaaaagcatgctaaagctagcgaagaggatgactgataatttctgtggaggggtttgtgcttcgtcgttacagaaatggagcaaactcaacgttggcaacgtcgacgaagacgttaggataatgactaggaagagtgtaaacaatcctggcgagccgcctgggataattctaaatgcggcgacgtcagtttggatgccggtatctccgaggcggttgtttgacttccttggaaacgaacggcttagatcggaatgggatatcttatccaacggtggaccaatgaaagagatggcccatatagctaaaggccatgaccgttccaactccgtctccctcctccgtgccagcgcgataaatgcgaatcagagtagtatgctgatattacaagagacaagcatagacgctgcaggagcggttgtcgtgtacgcgcctgttgatatcccagcaatgcaagctgtgatgaacggtggagattctgcttacgtggcactccttccttcaggattcgccattctccctaacggtcaggctggtacgcaacgctgcgccgcagaggaacgtaacagtattggtaacggtgggtgcatggaggaaggagggtcgttactaacggtggcgtttcagatactggtgaatagtttgcctacggctaagctaacggtggaatctgtggagacggttaataatttgatatcgtgcaccgttcagaagattaaagctgctcttcattgtgatagcacctga

SEQ ID NO: 401 - protein, 808 aa, Arabidopsis thaliana
MNFNGFLDDGAGASKLLSDAPYNNHFSFSAVDTMLGSAAIAPSQSLPFSSSGLSLGLQTNGEMSRNGEIMESNVSRKSSRGEDVESRSESDNAEAVSGDDLDTSDRPLKKKKRYHRHTPKQIQDLESVFKECAHPDEKQRLDLSRRLNLDPRQVKFWFQNRRTQMKTQIERHENALLRQENDKLRAENMSVREAMRNPMCGNCGGPAVIGEISMEEQHLRIENSRLKDELDRVCALTGKFLGRSNGSHHIPDSALVLGVGVGSGGCNVGGGFTLSSPLLPQASPRFEISNGTGSGLVATVNRQQPVSVSDFDQRSRYLDLALAAMDELVKMAQTREPLWVRSSDSGFEVLNQEEYDTSFSRCVGPKQDGFVSEASKEAGTVIINSLALVETLMDSERWAEMFPSMVSRTSTTEIISSGMGGRNGALHLMHAELQLLSPLVPVRQVSFLRFCKQHAEGVWAVVDVSIDSIREGSSSSCRRLPSGCLVQDMANGYSKVTWIEHTEYDENHIHRLYRPLLRCGLAFGAHRWMAALQRQCECLTILMSSTVSTSTNPSPINCNGRKSMLKLAKRMTDNFCGGVCASSLQKWSKLNVGNVDEDVRIMTRKSVNNPGEPPGIILNAATSVWMPVSPRRLFDFLGNERLRSEWDILSNGGPMKEMAHIAKGHDRSNSVSLLRASAINANQSSMLILQETSIDAAGAVVVYAPVDIPAMQAVMNGGDSAYVALLPSGFAILPNGQAGTQRCAAEERNSIGNGGCMEEGGSLLTVAFQILVNSLPTAKLTVESVETVNNLISCTVQKIKAALHCDST

SEQ ID NO: 402 - DNA, 2064 bp, Arabidopsis thaliana
atggagtttctcggcgacagtcaaaatcacgatagctctgaaacagagaagaagaacaagaagaagaagcgatttcaccgtcacacacctcaccagatccaacggcttgaatcaactttcaatgagtgtcaacatccagatgagaaacagaggaaccaacttagtagagagttgggtttagctccaagacagatcaagttctggtttcaaaacagaagaactcaaaagaaggcacaacacgaaagagctgataattgtgcattgaaagaagagaatgataagattcgatgcgaaaacattgctattagagaagctattaaacacgccatttgccccagctgtggtgattctcctgttaatgaagactcttactttgatgagcaaaagcttcgcatcgaaaatgcacagcttagagatgagctcgaaagggtttcgagtattgcagctaaattcttaggaagaccaatctcccatcttccaccattactaaatccgatgcatgtttcgccattagagttattccataccggaccttcacttgattttgatcttctcccaggaagttgttcttcaatgtctgttccaagtttaccatctcagccaaacttggttttatcagagatggataagtctcttatgaccaacattgctgtgaccgctatggaagaattgcttaggcttcttcaaacaaatgagcctctgtggatcaaaactgatggatgcagagatgttctcaatctcgaaaactatgagaatatgtttacaagatcaagtactagtggtggaaagaagaataaccttggaatggaagcatctagatcttctggtgttgttttcactaatgctattacacttgtggacatgcttatgaactctgtcaaattaacagagctttttccctcgatcgttgcatcatctaaaacccttgcagtgatttcatcgggattgcgtggaaaccatggagatgcattgcatttgatgattgaagagcttcaagtgctttcaccattggtaacaacgcgtgagttctgtgtgctaagatattgtcagcaaatcgaacatggaacttgggcaatagtaaatgtctcatatgagtttcctcagtttatatctcaatctcggtcatatagatttccttctggttgcttgatccaagatatgtccaatggctattcaaaggttacttgggtggaacatggtgaattcgaggagcaagaaccgatacatgagatgtttaaagatatagttcataaaggattagcttttggagctgaacgttggattgctactctccaaagaatgtgtgagagattcacgaatctattggaacctgcaacatcatcccttgatcttggaggagtgattccatcgccagaagggaagagaagtataatgagacttgctcacagaatggtaagcaacttctgcttgagtgttggcacatctaacaacactcgctcaacggttgtctcgggactggatgaatttggaatccgtgtgacttcgcataagagcagacatgaaccaaatggaatggttctatgtgcagccacaagtttctggctccctatttctccacaaaacgtcttcaatttcctcaaagatgagagaactcggcctcagtgggacgttctttcaaatggaaactctgttcaagaagttgctcatatcacaaacggatcaaatcctggaaactgcatatctgttcttcgtggattcaatgcatcatcatcacaaaacaacatgttgattctacaagaaagctgcatagactcatcaagtgcagcgcttgtgatctacactccagtggatctaccagcgttgaacatagcaatgagtggtcaagacacatcttatattccgatattaccctcaggttttgccatttcaccagacggaagcagcaaaggaggaggatcattgataacggttgggtttcagataatggtgagtggtttgcaaccggcaaaactgaacatggagtcaatggagacagtaaataatctcatcaataccactgtccaccaaattaaaacgaccttgaattgtccttcaactgcttga

SEQ ID NO: 403 - protein, 687 aa, Arabidopsis thaliana
MEFLGDSQNHDSSETEKKNKKKKRFHRHTPHQIQRLESTFNECQHPDEKQRNQLSRELGLAPRQIKFWFQNRRTQKKAQHERADNCALKEENDKIRCENIAIREAIKHAICPSCGDSPVNEDSYFDEQKLRIENAQLRDELERVSSIAAKFLGRPISHLPPLLNPMHVSPLELFHTGPSLDFDLLPGSCSSMSVPSLPSQPNLVLSEMDKSLMTNIAVTAMEELLRLLQTNEPLWIKTDGCRDVLNLENYENMFTRSSTSGGKKNNLGMEASRSSGVVFTNAITLVDMLMNSVKLTELFPSIVASSKTLAVISSGLRGNHGDALHLMIEELQVLSPLVTTREFCVLRYCQQIEHGTWAIVNVSYEFPQFISQSRSYRFPSGCLIQDMSNGYSKVTWVEHGEFEEQEPIHEMFKDIVHKGLAFGAERWIATLQRMCERFTNLLEPATSSLDLGGVIPSPEGKRSIMRLAHRMVSNFCLSVGTSNNTRSTVVSGLDEFGIRVTSHKSRHEPNGMVLCAATSFWLPISPQNVFNFLKDERTRPQWDVLSNGNSVQEVAHITNGSNPGNCISVLRGFNASSSQNNMLILQESCIDSSSAALVIYTPVDLPALNIAMSGQDTSYIPILPSGFAISPDGSSKGGGSLITVGFQIMVSGLQPAKLNMESMETVNNLINTTVHQIKTTLNCPSTA

SEQ ID NO: 404 - DNA, 2169 bp, Arabidopsis thaliana
atgagtttcgtcgtcggcgtcggcggaagtggtagtggaagcggcggagacggtggtggtagtcatcatcacgacggctctgaaactgataggaagaagaaacgttaccatcgtcacaccgctcaacagattcaacgccttgaatcgagtttcaaggagtgtcctcatccagatgagaaacagaggaaccagcttagcagagaattgggtttggctccaagacaaatcaagttctggtttcagaacagaagaactcagcttaaggctcaacatgagagagcagataatagtgcactaaaggcagagaatgataaaattcgttgcgaaaacattgctattagagaagctctcaagcatgctatatgtcctaactgtggaggtcctcctgttagtgaagatccttactttgatgaacaaaagcttcggattgaaaatgcacaccttagagaagagcttgaaagaatgtctaccattgcatcaaagtacatgggaagaccgatatcgcaactctctacgctacatccaatgcacatctcaccgttggatttgtcaatgactagtttaactggttgtggaccttttggtcatggtccttcactcgattttgatcttcttccaggaagttctatggctgttggtcctaataataatctgcaatctcagcctaacttggctatatcagacatggataagcctattatgaccggcattgctttgactgcaatggaagaattgctcaggcttcttcagacaaatgaacctctatggacaagaacagatggctgcagagacattctcaatcttggtagctatgagaatgttttcccaagatcaagtaaccgagggaagaaccagaactttcgagtcgaagcatcaaggtcttctggtattgtcttcatgaatgctatggcacttgtcgacatgttcatggattgtgtcaagtggacagaactctttccctctatcattgcagcttctaaaacacttgcagtgatttcttcaggaatgggaggtacccatgagggtgcattgcatttgttgtatgaagaaatggaagtgctttcgcctttagtagcaacacgcgaattctgcgagctacgctattgtcaacagactgaacaaggaagctggatagttgtaaacgtctcatatgatcttcctcagtttgtttctcactctcagtcctatagatttccatctggatgcttgattcaggatatgcccaatggatattccaaggttacttgggttgaacatattgaaactgaagaaaaagaactggttcatgagctatacagagagattattcacagagggattgcttttggggctgatcgttgggttaccactctccagagaatgtgtgaaagatttgcttctctatcggtaccagcgtcttcatctcgtgatctcggtggagtgattctatcaccggaagggaagagaagcatgatgagacttgctcagaggatgatcagcaactactgtttaagtgtcagcagatccaacaacacacgctcaaccgttgtttcggaactgaacgaagttggaatccgtgtgactgcacataagagccctgaaccaaacggcacagtcctatgtgcagccaccactttctggcttcccaattctcctcaaaatgtcttcaatttcctcaaagacgaaagaacccgtcctcagtgggatgttctttcaaacggaaacgcagtgcaagaagttgctcacatctcaaacggatcacatcctggaaactgcatatcggttctacgtggatccaatgcaacacatagcaacaacatgcttattctgcaagaaagctcaacagactcatcaggagcatttgtggtctacagtccagtggatttagcagcattgaacatcgcaatgagcggtgaagatccttcttatattcctctcttgtcctcaggtttcacaatctcaccagatggaaatggctcaaactctgaacaaggaggagcctcgacgagctcaggacgggcatcagctagcggttcgttgataacggttgggtttcagataatggtaagcaatttaccgacggcaaaactgaatatggagtcggtggaaacggttaataacctgataggaacaactgtacatcaaattaaaaccgccttgagcggtcctacagcttcaactacagcttga

SEQ ID NO: 405 - protein, 722 aa, Arabidopsis thaliana
MSFVVGVGGSGSGSGGDGGGSHHHDGSETDRKKKRYHRHTAQQIQRLESSFKECPHPDEKQRNQLSRELGLAPRQIKFWFQNRRTQLKAQHERADNSALKAENDKIRCENIAIREALKHAICPNCGGPPVSEDPYFDEQKLRIENAHLREELERMSTIASKYMGRPISQLSTLHPMHISPLDLSMTSLTGCGPFGHGPSLDFDLLPGSSMAVGPNNNLQSQPNLAISDMDKPIMTGIALTAMEELLRLLQTNEPLWTRTDGCRDILNLGSYENVFPRSSNRGKNQNFRVEASRSSGIVFMNAMALVDMFMDCVKWTELFPSIIAASKTLAVISSGMGGTHEGALHLLYEEMEVLSPLVATREFCELRYCQQTEQGSWIVVNVSYDLPQFVSHSQSYRFPSGCLIQDMPNGYSKVTWVEHIETEEKELVHELYREIIHRGIAFGADRWVTTLQRMCERFASLSVPASSSRDLGGVILSPEGKRSMMRLAQRMISNYCLSVSRSNNTRSTVVSELNEVGIRVTAHKSPEPNGTVLCAATTFWLPNSPQNVFNFLKDERTRPQWDVLSNGNAVQEVAHISNGSHPGNCISVLRGSNATHSNNMLILQESSTDSSGAFVVYSPVDLAALNIAMSGEDPSYIPLLSSGFTISPDGNGSNSEQGGASTSSGRASASGSLITVGFQIMVSNLPTAKLNMESVETVNNLIGTTVHQIKTALSGPTASTTA

SEQ ID NO: 406 - DNA, 2166 bp, Arabidopsis thaliana
atgttcgagccaaatatgctgcttgcggctatgaacaacgcagacagcaataaccacaactacaaccatgaagacaacaataatgaaggatttcttcgggacgatgaattcgacagtccgaatactaaatcgggaagtgagaatcaagaaggaggatcaggaaacgaccaagatcctcttcatcctaacaagaagaaacgatatcatcgacacacccaacttcagatccaggagatggaagcgttcttcaaagagtgtcctcacccagatgacaagcaaaggaaacagctaagccgtgaattgaatttggaacctcttcaggtcaaattctggttccaaaacaaacgtacccaaatgaagaatcatcacgagcggcatgagaactcacatcttcgggcggagaacgaaaagcttcgaaacgacaacctaagatatcgagaggctcttgcaaatgcttcgtgtcctaattgtggtggtccaacagctatcggagaaatgtcattcgacgaacaccaactccgtctcgaaaatgctcgattaagggaagagatcgaccgtatatccgcaatcgcagctaaatacgtaggcaagccagtctcaaactatccacttatgtctcctcctcctcttcctccacgtccactagaactcgccatgggaaatattggaggagaagcttatggaaacaatccaaacgatctccttaagtccatcactgcaccaacagaatctgacaaacctgtcatcatcgacttatccgtggctgcaatggaagagctcatgaggatggttcaagtagacgagcctctgtggaagagtttggttttagacgaagaagaatatgcaaggacctttcctagagggatcggacctagaccggctggatatagatcagaagcttcgcgagaaagcgcggttgtgatcatgaatcatgttaacatcgttgagattctcatggatgtgaatcaatggtcgacgattttcgcggggatggtttctagagcaatgacattagcggttttatcgacaggagttgcaggaaactataatggagctcttcaagtgatgagtgcagagtttcaagttccatctccattagtcccaacacgtgaaacctatttcgcacgttactgtaaacaacaaggagatggttcgtgggcggttgtcgatatttcgttggatagtctccaaccaaatcccccggctagatgcaggcggcgagcttcaggatgtttgattcaagaattgccaaatggatattctaaggtgacttgggtggagcatgtggaagttgatgacagaggagttcataacttatacaaacacatggttagtactggtcatgcctttggtgctaaacgctgggtagccattcttgaccgccaatgcgagcggttagctagtgtcatggctacaaacatttcctctggagaagttggcgtgataaccaaccaagaagggaggaggagtatgctgaaattggcagagcggatggttataagcttttgtgcaggagtgagtgcttcaaccgctcacacgtggactacattgtccggtacaggagctgaagatgttagagtgatgactaggaagagtgtggatgatccaggaaggcctcctggtattgttcttagtgcagccacttctttttggatccctgttcctccaaagcgagtctttgacttcctcagagacgagaattcaagaaatgagtgggatattctgtctaatggaggagttgtgcaagaaatggcacatattgctaacgggagggataccggaaactgtgtttctcttcttcgggtaaatagtgcaaactctagccagagcaatatgctgatcctacaagagagctgcactgatcctacagcttcctttgtgatctatgctccagtcgatattgtagctatgaacatagtgcttaatggaggtgatccagactatgtggctctgcttccatcaggttttgctattcttcctgatggtaatgccaatagtggagcccctggaggagatggagggtcgctcttgactgttgcttttcagattctggttgactcagttcctacggctaagctgtctcttggctctgttgcaactgtcaacaatctaatagcttgcactgttgagagaatcaaagcttcaatgtcttgtgagactgcttga

SEQ ID NO: 407 - protein, 721 aa, Arabidopsis thaliana
MFEPNMLLAAMNNADSNNHNYNHEDNNNEGFLRDDEFDSPNTKSGSENQEGGSGNDQDPLHPNKKKRYHRHTQLQIQEMEAFFKECPHPDDKQRKQLSRELNLEPLQVKFWFQNKRTQMKNHHERHENSHLRAENEKLRNDNLRYREALANASCPNCGGPTAIGEMSFDEHQLRLENARLREEIDRISAIAAKYVGKPVSNYPLMSPPPLPPRPLELAMGNIGGEAYGNNPNDLLKSITAPTESDKPVIIDLSVAAMEELMRMVQVDEPLWKSLVLDEEEYARTFPRGIGPRPAGYRSEASRESAVVIMNHVNIVEILMDVNQWSTIFAGMVSRAMTLAVLSTGVAGNYNGALQVMSAEFQVPSPLVPTRETYFARYCKQQGDGSWAVVDISLDSLQPNPPARCRRRASGCLIQELPNGYSKVTWVEHVEVDDRGVHNLYKHMVSTGHAFGAKRWVAILDRQCERLASVMATNISSGEVGVITNQEGRRSMLKLAERMVISFCAGVSASTAHTWTTLSGTGAEDVRVMTRKSVDDPGRPPGIVLSAATSFWIPVPPKRVFDFLRDENSRNEWDILSNGGVVQEMAHIANGRDTGNCVSLLRVNSANSSQSNMLILQESCTDPTASFVIYAPVDIVAMNIVLNGGDPDYVALLPSGFAILPDGNANSGAPGGDGGSLLTVAFQILVDSVPTAKLSLGSVATVNNLIACTVERIKASMSCETA

SEQ ID NO: 408 - DNA, 2160 bp, Arabidopsis thaliana
atgttcgagccaaatatgctgcttgcggctatgaacaacgcagacagcaataaccacaactacaaccatgaagacaacaataatgaaggatttcttcgggacgatgaattcgacagtccgaatactaaatcgggaagtgagaatcaagaaggaggatcaggaaacgaccaagatcctcttcatcctaacaagaagaaacgatatcatcgacacacccaacttcagatccaggagatggaagcgttcttcaaagagtgtcctcacccagatgacaagcaaaggaaacagctaagccgtgaattgaatttggaacctcttcaggtcaaattctggttccaaaacaaacgtacccaaatgaagaatcatcacgagcggcatgagaactcacatcttcgggcggagaacgaaaagcttcgaaacgacaacctaagatatcgagaggctcttgcaaatgcttcgtgtcctaattgtggtggtccaacagctatcggagaaatgtcattcgacgaacaccaactccgtctcgaaaatgctcgattaagggaagagatcgaccgtatatccgcaatcgcagctaaatacgtaggcaagccagtctcaaactatccacttatgtctcctcctcctcttcctccacgtccactagaactcgccatgggaaatattggaggagaagcttatggaaacaatccaaacgatctccttaagtccatcactgcaccaacagaatctgacaaacctgtcatcatcgacttatccgtggctgcaatggaagagctcatgaggatggttcaagtagacgagcctctgtggaagagtttggttttagacgaagaagaatatgcaaggacctttcctagagggatcggacctagaccggctggatatagatcagaagcttcgcgagaaagcgcggttgtgatcatgaatcatgttaacatcgttgagattctcatggatgtgaatcaatggtcgacgattttcgcggggatggtttctagagcaatgacattagcggttttatcgacaggagttgcaggaaactataatggagctcttcaagtgatgagtgcagagtttcaagttccatctccattagtcccaacacgtgaaacctatttcgcacgttactgtaaacaacaaggagatggttcgtgggcggttgtcgatatttcgttggatagtctccaaccaaatcccccggctagatgcaggcggcgagcttcaggatgtttgattcaagaattgccaaatggatattctaaggtgacttgggtggagcatgtggaagttgatgacagaggagttcataacttatacaaacacatggttagtactggtcatgcctttggtgctaaacgctgggtagccattcttgaccgccaatgcgagcggttagctagtgtcatggctacaaacatttcctctggagaagttggcgtgataaccaaccaagaagggaggaggagtatgctgaaattggcagagcggatggttataagcttttgtgcaggagtgagtgcttcaaccgctcacacgtggactacattgtccggtacaggagctgaagatgttagagtgatgactaggaagagtgtggatgatccaggaaggcctcctggtattgttcttagtgcagccacttctttttggatccctgttcctccaaagcgagtctttgacttcctcagagacgagaattcaagaaatgagtgggatattctgtctaatggaggagttgtgcaagaaatggcacatattgctaacgggagggataccggaaactgtgtttctcttcttcggagtgcaaactctagccagagcaatatgctgatcctacaagagagctgcactgatcctacagcttcctttgtgatctatgctccagtcgatattgtagctatgaacatagtgcttaatggaggtgatccagactatgtggctctgcttccatcaggttttgctattcttcctgatggtaatgccaatagtggagcccctggaggagatggagggtcgctcttgactgttgcttttcagattctggttgactcagttcctacggctaagctgtctcttggctctgttgcaactgtcaacaatctaatagcttgcactgttgagagaatcaaagcttcaatgtcttgtgagactgcttga

SEQ ID NO: 409 - protein, 719 aa, Arabidopsis thaliana
MFEPNMLLAAMNNADSNNHNYNHEDNNNEGFLRDDEFDSPNTKSGSENQEGGSGNDQDPLHPNKKKRYHRHTQLQIQEMEAFFKECPHPDDKQRKQLSRELNLEPLQVKFWFQNKRTQMKNHHERHENSHLRAENEKLRNDNLRYREALANASCPNCGGPTAIGEMSFDEHQLRLENARLREEIDRISAIAAKYVGKPVSNYPLMSPPPLPPRPLELAMGNIGGEAYGNNPNDLLKSITAPTESDKPVIIDLSVAAMEELMRMVQVDEPLWKSLVLDEEEYARTFPRGIGPRPAGYRSEASRESAVVIMNHVNIVEILMDVNQWSTIFAGMVSRAMTLAVLSTGVAGNYNGALQVMSAEFQVPSPLVPTRETYFARYCKQQGDGSWAVVDISLDSLQPNPPARCRRRASGCLIQELPNGYSKVTWVEHVEVDDRGVHNLYKHMVSTGHAFGAKRWVAILDRQCERLASVMATNISSGEVGVITNQEGRRSMLKLAERMVISFCAGVSASTAHTWTTLSGTGAEDVRVMTRKSVDDPGRPPGIVLSAATSFWIPVPPKRVFDFLRDENSRNEWDILSNGGVVQEMAHIANGRDTGNCVSLLRSANSSQSNMLILQESCTDPTASFVIYAPVDIVAMNIVLNGGDPDYVALLPSGFAILPDGNANSGAPGGDGGSLLTVAFQILVDSVPTAKLSLGSVATVNNLIACTVERIKASMSCETA

SEQ ID NO: 410 - DNA, 2409 bp, Arabidopsis thaliana
atgaacttcggtagtctcttcgataacacacccggtggtggctctaccggagcaagacttctctccggtttaagttatggcaaccacaccgccgcaactaacgtcttacccggtggtgctatggctcaagcggcagcggctgctagtctcttctctcctcctctaacgaaatctgtttacgcttcttctggcctctctctagccctcgagcaaccggagagaggaaccaaccgtggagaagcatcgatgaggaacaataataacgtcggaggaggaggcgatactttcgatgggagtgtgaacagaagaagccgagaagaagaacatgagagtagatctggtagtgataacgttgaaggtatctccggtgaagatcaagacgctgctgataagcctcctcggaagaaacgttatcaccgacacactcctcaacaaatccaagaactcgaatctatgttcaaagagtgtccgcatccagacgagaaacaaagattagaactaagtaagagactttgcttagagacaagacaagtcaagttctggttccagaatcgtcgcactcagatgaagactcaattagagaggcatgagaacgcgttattgagacaagagaacgataagttaagagctgagaacatgtctattcgtgaagcaatgaggaatccaatctgcaccaattgtggtggacctgccatgcttggtgatgtctctcttgaagaacatcatctccgtatcgaaaacgctcgtttaaaagacgagcttgatcgtgtctgtaacctcaccggtaagttccttggccaccaccataatcaccactacaactcctccttagaactcgctgtcggcaccaacaacaacggtggacatttcgctttccctcctgatttcggcggtggtggtggttgcttacctccgcagcagcagcagtcgacggtgattaatgggattgatcagaagtcagttttgctggagctggctttaactgctatggatgagttagtgaagcttgctcagagtgaagaaccgttatgggtcaaaagcttggacggtgagagagacgagcttaaccaagatgagtacatgagaacattttcatctactaaaccaaccggtttagctactgaagcttctagaacctctggtatggtcatcatcaatagcttagctctcgtcgagactttaatggactccaatcggtggacggagatgttcccgtgtaacgtcgcaagagctacaaccaccgacgttatatccggtgggatggctggaacaataaatggtgcacttcaactgatgaatgcagagctacaagttttgtctccactggttccggttcgtaatgttaatttcctccggttctgcaaacagcacgcggagggtgtgtgggcggtggtggatgtatcaattgatcctgtcagggaaaactctggtggtgccccggtaatccggcgactaccatcaggatgtgtggtgcaggatgtgtctaatggatactctaaggtcacgtgggtggagcatgcagaatacgacgagaaccaaatccaccagctgtacaggccgttgctacggtcaggccttggttttggctctcaaagatggctcgctacacttcagagacagtgcgagtgtctcgccatcctcatttcttcctccgttacatctcacgacaacacatcaataacgcctggtggtcgaaaaagcatgctgaagttagctcaacgcatgacgttcaacttctgttcgggaatctcggcgccgtcggtccacaattggagcaagctcactgttggaaatgttgacccggacgttcgagttatgacccgtaagagtgtggacgatccaggagagcctccggggattgttttgagtgctgccacttctgtttggctacctgctgcaccacagcgtctgtatgatttcttgcggaacgaacggatgagatgcgaatgggatattctatccaacggtggtcccatgcaggagatggcccatatcaccaaaggtcaagatcagggtgtctctctgctccgctccaatgcaatgaacgcgaatcagagtagtatgctaattcttcaggagacatgcattgacgcatctggagcgcttgtagtatacgcgcctgtcgacattcccgccatgcatgtggtgatgaacggtggtgattcatcctacgtggctctccttccgtccggtttcgctgttcttcctgacggaggcattgacggtggtgggtcaggtgatggtgaccagcgaccggttggtggtggatccctcttgacagtggcgtttcaaatccttgtaaacaatctcccaacggcaaaactcacggttgagtcggtggagactgtcaacaacctaatatcatgcaccgttcagaagattcgtgccgctttacaatgcgaaagctga

SEQ ID NO: 411 - protein, 802 aa, Arabidopsis thaliana
MNFGSLFDNTPGGGSTGARLLSGLSYGNHTAATNVLPGGAMAQAAAAASLFSPPLTKSVYASSGLSLALEQPERGTNRGEASMRNNNNVGGGGDTFDGSVNRRSREEEHESRSGSDNVEGISGEDQDAADKPPRKKRYHRHTPQQIQELESMFKECPHPDEKQRLELSKRLCLETRQVKFWFQNRRTQMKTQLERHENALLRQENDKLRAENMSIREAMRNPICTNCGGPAMLGDVSLEEHHLRIENARLKDELDRVCNLTGKFLGHHHNHHYNSSLELAVGTNNNGGHFAFPPDFGGGGGCLPPQQQQSTVINGIDQKSVLLELALTAMDELVKLAQSEEPLWVKSLDGERDELNQDEYMRTFSSTKPTGLATEASRTSGMVIINSLALVETLMDSNRWTEMFPCNVARATTTDVISGGMAGTINGALQLMNAELQVLSPLVPVRNVNFLRFCKQHAEGVWAVVDVSIDPVRENSGGAPVIRRLPSGCVVQDVSNGYSKVTWVEHAEYDENQIHQLYRPLLRSGLGFGSQRWLATLQRQCECLAILISSSVTSHDNTSITPGGRKSMLKLAQRMTFNFCSGISAPSVHNWSKLTVGNVDPDVRVMTRKSVDDPGEPPGIVLSAATSVWLPAAPQRLYDFLRNERMRCEWDILSNGGPMQEMAHITKGQDQGVSLLRSNAMNANQSSMLILQETCIDASGALVVYAPVDIPAMHVVMNGGDSSYVALLPSGFAVLPDGGIDGGGSGDGDQRPVGGGSLLTVAFQILVNNLPTAKLTVESVETVNNLISCTVQKIRAALQCES

SEQ ID NO: 412 - DNA, 2289 bp, Arabidopsis thaliana
atgtatcatccaaacatgttcgaatctcatcatcatatgttcgatatgacgccgaaaaactccgaaaacgatttgggtatcaccgggagccacgaagaggatttcgagactaagtccggcgcagaagtcaccatggagaatcctttagaagaagagcttcaagatcctaatcagcgtcccaacaaaaagaagcgttaccaccgtcacacacaacgccagattcaagagctagagtcgttcttcaaggaatgtcctcatccagacgataagcaaagaaaggagctgagtcgcgagctaagcttagaacctcttcaagtcaagttttggttccaaaacaaacgcactcaaatgaaggcacaacatgagaggcacgagaaccagatactgaagtcagaaaatgacaagctccgagcagagaacaataggtacaaggatgctctaagcaacgcaacatgcccaaactgtggtggtccggcagctataggagaaatgtccttcgacgaacagcatttaaggatcgaaaatgctcgtttacgcgaagagattgacagaatctctgccatagctgctaaatacgtagggaagcctttaatggctaattcctcttctttccctcagctctcttcttcacaccacattccctcgcgctcgcttgatcttgaagttgggaactttgggaacaataacaatagccacactggtttcgttggggaaatgtttggaagcagcgacattttgaggtcggtttcgataccttctgaggctgataagcctatgattgttgagttagctgttgcagcaatggaagagcttgtgagaatggctcaaactggtgatcccttatgggtttcaagcgataattctgttgagattctcaatgaagaagagtattttaggacgtttcctagaggaattggaccgaaacctatcggtttgagatcagaagcttcaagagagtctactgttgttatcatgaatcatatcaatctcattgagattctaatggatgtgaatcaatggtctagtgtgttctgcgggattgtatcaagagcattgactctagaagttctctcaactggcgtagcagggaactacaatggggcattgcaagtgatgacagcagagttccaagtcccatcgccgcttgtccctactcgtgagaactactttgtaaggtactgtaaacagcacagtgacggtatttgggcggttgtggatgtctctttggacagcctaagaccaagtccgatcactagaagcagaagaagaccctctggttgtctgattcaagaattgcagaatggttactccaaggtgacatgggtagagcatattgaggtggatgatagatcggttcacaacatgtataaaccgttggttaataccggtttagctttcggtgcaaaacgttgggtggctacacttgaccgccaatgtgagcggctcgccagttccatggccagcaacattccggcttgtgatctttccgtgataacgagtcctgaggggagaaagagcatgctgaaactagcggagagaatggtgatgagcttctgtaccggagtcggcgcgtcaactgcgcatgcctggactacattgtcgaccacaggatccgacgacgttcgggtcatgacccgaaagagcatggatgatccgggaagacctccaggcatcgttctcagcgccgctacttctttctggatccctgtagctccaaaacgagtgttcgattttctcagagatgaaaactcaagaagcgagtgggatatactttccaatggaggcttggttcaagaaatggctcatatcgcaaatggtcgtgatcctgggaatagtgtctccttgcttcgagtcaatagtgggaactcagggcagagcaacatgttgatcttacaagaaagttgtacggacgcatcagggtcctatgtgatatacgcaccagttgatataatagctatgaacgttgtcctgagtggtggtgatccggattatgtcgctttgttaccatccggattcgctattttgccggatggctctgctagaggaggaggaggtagtgctaatgccagtgctggagccggagttgaaggaggaggagaggggaataatcttgaagtggttactactactgggagttgtggcggttcactactcacagttgcgtttcagatacttgttgactctgttcctaccgctaaactctctctcggttcagttgctacagtcaatagtctgatcaaatgcactgtcgagcggattaaagccgctctggcctgcgacggagcctaa

SEQ ID NO: 413 - protein, 762 aa, Arabidopsis thaliana
MYHPNMFESHHHMFDMTPKNSENDLGITGSHEEDFETKSGAEVTMENPLEEELQDPNQRPNKKKRYHRHTQRQIQELESFFKECPHPDDKQRKELSRELSLEPLQVKFWFQNKRTQMKAQHERHENQILKSENDKLRAENNRYKDALSNATCPNCGGPAAIGEMSFDEQHLRIENARLREEIDRISAIAAKYVGKPLMANSSSFPQLSSSHHIPSRSLDLEVGNFGNNNNSHTGFVGEMFGSSDILRSVSIPSEADKPMIVELAVAAMEELVRMAQTGDPLWVSSDNSVEILNEEEYFRTFPRGIGPKPIGLRSEASRESTVVIMNHINLIEILMDVNQWSSVFCGIVSRALTLEVLSTGVAGNYNGALQVMTAEFQVPSPLVPTRENYFVRYCKQHSDGIWAVVDVSLDSLRPSPITRSRRRPSGCLIQELQNGYSKVTWVEHIEVDDRSVHNMYKPLVNTGLAFGAKRWVATLDRQCERLASSMASNIPACDLSVITSPEGRKSMLKLAERMVMSFCTGVGASTAHAWTTLSTTGSDDVRVMTRKSMDDPGRPPGIVLSAATSFWIPVAPKRVFDFLRDENSRSEWDILSNGGLVQEMAHIANGRDPGNSVSLLRVNSGNSGQSNMLILQESCTDASGSYVIYAPVDIIAMNVVLSGGDPDYVALLPSGFAILPDGSARGGGGSANASAGAGVEGGGEGNNLEVVTTTGSCGGSLLTVAFQILVDSVPTAKLSLGSVATVNSLIKCTVERIKAALACDGA

SEQ ID NO: 414 - DNA, 2157 bp, Glycine max
atggagtttggaagtggttctcctggtgatcgccatcatcaccatgatggttcttctgattcccagcgaaggaagaagcgttaccaccgtcacacagctaaccagattcaaaggcttgaatcgatgttcaaggagtgtccgcacccagatgagaagcagagattgcagttgagtagggagttaggcttggcgcctagacagatcaaattttggttccagaacaggaggacccagatgaaggctcagcatgagagagctgataattgtgcactccgggcagagaatgataagatacgttgtgagaacatagccataagggaagccttgaaaaatgttatctgcccctcttgtggtggtcctcctatgaatgatgattgttattttgatgaacagaagttgagattggagaatgcccaactcaaagaggagcttgatagagtatctagcattgcagctaagtacattggaaggccaatttctcaactcccacctgttcagcctatccacatatcttctctggacttgtcaatggggacttttgcaagccaagggttgggtggcccttcccttgatcttgatcttctcccagggagttcttcatcatccatgccgaatgtgcctcctttccaacccccttgtctttcggacatggataagtccctcatgtcagacattgcctcaaatgccatggaggaaatgatcaggctattgcaaacaaatgagcccttgtggatgaaaggtgctgatgggagggatgtgcttgatcttgattcctatgaaaggatgttccccaaggctaatagtcacttgaagaaccccaatgttcacgttgaagcttctagagattcaggagttgttattatgaatggcttaactttggttgacatgtttatggacccgaacaagtggatggagctattttccaccattgtcacaatggctagaacaattgaggttatatcttctggaatgatgggtggccatggtggttctttgcaattgatgtatgaggagttgcaagtgctttctccacttgtttctactagagaattctatttcctgcgttactgtcaacaaattgaacaaggcttatgggcaatagtagatgtttcatatgattttactcaagataaccaatttgctcctcaatttcgatctcaccgtcttccttctggtgtctttatccaagacatgcctaatggatattccaaggttacttggattgaacatgtagagattgaagacaaaaccccagttcataggctctatagaaacattatttacagtggcattgcatttggagcacaaagatggctaactacacttcagaggatgtgtgaaaggattgcttgtctattggtgacaggaaattcaacccgtgatcttggaggagtgattccttctcctgagggcaagaggagcatgatgaaacttgcacaaagaatggtcaccaatttttgtgcaagcattagttcatcagctggccacagatggaccacactctctgggagtggcatgaatgaggttggagtcagagtcactgtgcacaagagctcagaccctggccaacctaatggtgtggttctaagtgcagctaccaccatttggctccccatccctccacaaactgtgttcaatttctttaaggatgaaaagaaaaggcctcagtgggatgttctttccaatggcaatgctgtgcaagaggttgctcatatagcaaatggttcacaccctggtaactgcatatctgtgcttcgagcattcaactcaagtcaaaacaacatgctgatcctccaggagagctgtgtggactcctcaggttccctagtggtgtactgtccagttgatctgccagccatcaacatagcaatgagtggtgaggacccttcttacatccctctccttccctcaggtttcaccatttccccggacggccaagccgaccaagacggcggaggagcctcaaccagcacaagcagcagggtcatggggggtggttctggttctggtggctcactcatcactgttgcattccaaatcctagtgagtagcttgccatctgccaaactcaacatggagtcggtgacaactgttaatagcctcattggcaacactgtccaacacattaaggctgctttgaattgtcctagttcctga

SEQ ID NO: 415 - protein, 718 aa, Glycine max
MEFGSGSPGDRHHHHDGSSDSQRRKKRYHRHTANQIQRLESMFKECPHPDEKQRLQLSRELGLAPRQIKFWFQNRRTQMKAQHERADNCALRAENDKIRCENIAIREALKNVICPSCGGPPMNDDCYFDEQKLRLENAQLKEELDRVSSIAAKYIGRPISQLPPVQPIHISSLDLSMGTFASQGLGGPSLDLDLLPGSSSSSMPNVPPFQPPCLSDMDKSLMSDIASNAMEEMIRLLQTNEPLWMKGADGRDVLDLDSYERMFPKANSHLKNPNVHVEASRDSGVVIMNGLTLVDMFMDPNKWMELFSTIVTMARTIEVISSGMMGGHGGSLQLMYEELQVLSPLVSTREFYFLRYCQQIEQGLWAIVDVSYDFTQDNQFAPQFRSHRLPSGVFIQDMPNGYSKVTWIEHVEIEDKTPVHRLYRNIIYSGIAFGAQRWLTTLQRMCERIACLLVTGNSTRDLGGVIPSPEGKRSMMKLAQRMVTNFCASISSSAGHRWTTLSGSGMNEVGVRVTVHKSSDPGQPNGVVLSAATTIWLPIPPQTVFNFFKDEKKRPQWDVLSNGNAVQEVAHIANGSHPGNCISVLRAFNSSQNNMLILQESCVDSSGSLVVYCPVDLPAINIAMSGEDPSYIPLLPSGFTISPDGQADQDGGGASTSTSSRVMGGGSGSGGSLITVAFQILVSSLPSAKLNMESVTTVNSLIGNTVQHIKAALNCPSS

SEQ ID NO: 416 - DNA, 2256 bp, Glycine max
atggagggccccagtgagataggtctcattggagaaaattttgatgctggtttgatggggaggatgagggacgatgagtatgaaagccgttctggaagtgataactttgaaggcgcatctggtgatgatcaggatggtggtgatgatcagccacagaggaagaagagataccacagacacacccctcaccaaattcaagagcttgaggctttcttcaaggagtgtcctcatcctgatgagaagcaaaggttggatctaagtaagaggcttgctttggagaataagcaagtcaagttttggtttcagaatcgacgaacccaaatgaagacccaactggaacgccatgagaacataatgcttaggcaggagaatgataagctcagagctgagaacagtttgatgaaggacgccatgtcaaatccagtgtgtaacaactgtggtggccctgctattcctggccaaatttcatttgaagagcatcagattagaattgagaatgctagactaaaggatgaattgaaccgtatatgcgccttagcaaacaagttccttggcaagccaatctcatcattgaccaatcccatggctctcccaacctcaaattctggtcttgaacttggtattggaaggaatgggattggtggttcaagcacccttggcactcccttgcctatggggcttgatttgggagatggagtgttgggcactcaacctgcaatgcctgggattagaccagcattgggattgatgggaaatgaagttcagcttgagagatctatgcttatagatcttgcattggctgctatggaggaattgctgaagatgactcaggcagagagcccactttggatcaagagtttggatggtgagaaggaaatgtttaaccatgaggagtatgcaaggttgttttctccttgtattggtccaaaacccactggctatataactgaagctacaagagaaactgggatagtaatcatcaacagtttagcccttgtggaaactttgatggacgcgaatcgatgggcagagatgtttccctctatgattgctagagctatcaacctcgatgttatatctaatggcatgggtggaacaagaaatggtgctctacaagtgatgcatgctgaggttcaattgctttcgccactagttcctgtccgtcaagtaagattcatccgattctgtaagcagcatgcagaaggtgtttgggctgtggttgatgtttctattgagattggtcatgatgctgctaatgcacagccagtcatgagctgtaggaggcttccttctggctgtattgtgcaggatatgcccaatggttactccaaggttacttggcttgaacactgggagtatgatgagaatgttgtacaccaactttatcgcccattgcttagttctggtgttggatttggtgctcatagatggatcgctaccctccaaaggcaatgtgaatgcttggctatcctcatgtcctcttccatttcaagtgatgatcacacagcattgagccaagctggtaggagaagcatgttgaaattggcacaacgcatgactagtaacttctgttccggggtttgtgcttcgtccgctcggaagtgggacagccttcacatagggactcttggtgatgacatgaaagtgatgactaggaaaaacgtggatgaccctggtgagcctcctgggattgtactcagtgctgccacttctgtttgggtgccagtgtcacggcaaaggctgttcgactttctacgtgatgaacgcttgagaagtgagtgggacatcttgtccaatggtggaccaatgcaggagatggtacatattgccaaaggacaaggacatggaaactgcgtttctcttcttcgtgctaatgccgttaacgccaacgatagcagcatgctgattctgcaggaaacatggatggacgcgtcgtgctcagtggtggtatatgcaccagttgacgtgcaatcactgaacgtggtgatgagtggtggagattctgcatacgttgcactcttgccttcaggctttgcaattctccccgatggccactgcaacgacaacggctgcaacgggactttacagaagggtggcggtggcaatgacggcggcggaagccttctcacagtcgggttccaaatactggtgaacagtctcccaacagcaaagctcacagtggagtcagtggacactgtgaacaacctcatctcctgcaccattcagaagatcaaagcttctctcagagttgcatga

SEQ ID NO: 417 - protein, 751 aa, Glycine max
MEGPSEIGLIGENFDAGLMGRMRDDEYESRSGSDNFEGASGDDQDGGDDQPQRKKRYHRHTPHQIQELEAFFKECPHPDEKQRLDLSKRLALENKQVKFWFQNRRTQMKTQLERHENIMLRQENDKLRAENSLMKDAMSNPVCNNCGGPAIPGQISFEEHQIRIENARLKDELNRICALANKFLGKPISSLTNPMALPTSNSGLELGIGRNGIGGSSTLGTPLPMGLDLGDGVLGTQPAMPGIRPALGLMGNEVQLERSMLIDLALAAMEELLKMTQAESPLWIKSLDGEKEMFNHEEYARLFSPCIGPKPTGYITEATRETGIVIINSLALVETLMDANRWAEMFPSMIARAINLDVISNGMGGTRNGALQVMHAEVQLLSPLVPVRQVRFIRFCKQHAEGVWAVVDVSIEIGHDAANAQPVMSCRRLPSGCIVQDMPNGYSKVTWLEHWEYDENVVHQLYRPLLSSGVGFGAHRWIATLQRQCECLAILMSSSISSDDHTALSQAGRRSMLKLAQRMTSNFCSGVCASSARKWDSLHIGTLGDDMKVMTRKNVDDPGEPPGIVLSAATSVWVPVSRQRLFDFLRDERLRSEWDILSNGGPMQEMVHIAKGQGHGNCVSLLRANAVNANDSSMLILQETWMDASCSVVVYAPVDVQSLNVVMSGGDSAYVALLPSGFAILPDGHCNDNGCNGTLQKGGGGNDGGGSLLTVGFQILVNSLPTAKLTVESVDTVNNLISCTIQKIKASLRVA

SEQ ID NO: 418 - DNA, 2256 bp, Glycine max
atggccgccgacatgtccaacaataataatcctcctcccacttctcacgccaaagacttctttgcttctcctgctctctctctcagccttgctggtatttttcgccatgccggggttgccgcggcggatgaggctgccacttcggtggaggagggtgaagagtgtgagaggttagatgatattagcagcgagaactccggtcccacaagatccagatcagaggatgatttcgaagttgaagctgaacatgaagatgacgatgctgatggagacaagaacaagaacaagaagaggaagaaatatcacaggcacactgctgaccagatcaaagaaatggaagcgcttttcaaagagtcaccacatcctgatgaaaagcagaggcaacaactaagcaagcaattaggccttgccccaaggcaagtcaagttttggttccaaaatcgtcgaacccaaatcaaggcaatacaagagcgtcatgaaaattctttgttgaagtcagaaatagagaaactaaaggagaaaaacaagaccttacgagagaccataaacaaagcttgttgccccaactgtggcgtgcctaccacaagcagagatggtgccatgccaactgaagaacaacaactacgtattgaaaatgccaaactcaaagctgaggtagagaagctccgagcagttttagggaaatacgcaccagggtcaacgtccccttcatgttcttctggccatgaccaagagaatagaagctctttggatttttacactggaatttttggacttgataagtcaaggataatggatacagtaaaccaagctatggaggagctcatcaagatggctaccgtgggggaaccattatggcttcgtagcttcgagactggtcgcgaaattcttaactatgatgaatatgttagggagtttgcagttgaaaattcaagcagtggaaagccaaggagatccattgaagcctcaagagacactgcagttgtttttgtggatctccctcggcttgtccaaagttttctagatgtgaatcagtggaaggaaatgtttccgtgtttaatatctaaggcggccactgttgatgtaatatgcaatggagagggtcctggcaggaatggtgcagtgcaactgatgtttgctgagctgcaaatgctcactcctatggtgcccacaagagaagtatattttgtccgtttctgcaagcagttgagtgctgaacagtgggcaatcgttgatgtatccatagacaaagtagaagacaacattgacgcgtccctcgtgaaatgcagaaaacgcccttccggttgcattattgaggacaagtccaatggccattgcaaagtaatatgggtggagcacttggaatgccagaagagtgcagtccattcaatgtatcgcaccattgtgaacagtggcctagcttttggggccaggcattggattgcgactctacaacttcaatgtgaacgtctagttttcttcatggcaacaaatgttcccatgaaggattcaaccggtgttgccacgttggccgggagaaaaagcattttgaagttggcacaaagaatgacatggagtttctgccatgcaattggcgcgtcaagcttccacacatggactaagtttacaagtaaaactggagaagacataaggataagttctagaaagaacttgaacgatcctggtgaacctcttgggttgatattgtgcgctgtttgttctgtatggttgcctgtctcacctaatgttctgtttgatttcctgagggatgaaacgcgacgaactgaatgggacatcatgtcaagtggtgggacagtgcagtccattgcaaatttagccaaaggacaagaccgaggaaatgccgtagccattcaaacaattaaatcgaaagaaaacagtgtgtggatactgcaagatagctacacaaacccttatgagtcaatggtggtatatgcttctgtggacattactggcactcagtctgtgatgacaggatgtgattcgagcaatcttgccatactgccctcaggattctctattattcctgatggtcttgagtcaaggccattggtgattagttcaaggcaggaagaaaaaaataccgagggaggatctttgtttacaatggcattccagattcttaccaatgcttctcccgctgccaagttaacaatggagtctgtggactcggtcaacactcttgtatcttgtacattgagaaatatccgaacgagtctacaatgtgaagatggctag

SEQ ID NO: 419 - protein, 751 aa, Glycine max
MAADMSNNNNPPPTSHAKDFFASPALSLSLAGIFRHAGVAAADEAATSVEEGEECERLDDISSENSGPTRSRSEDDFEVEAEHEDDDADGDKNKNKKRKKYHRHTADQIKEMEALFKESPHPDEKQRQQLSKQLGLAPRQVKFWFQNRRTQIKAIQERHENSLLKSEIEKLKEKNKTLRETINKACCPNCGVPTTSRDGAMPTEEQQLRIENAKLKAEVEKLRAVLGKYAPGSTSPSCSSGHDQENRSSLDFYTGIFGLDKSRIMDTVNQAMEELIKMATVGEPLWLRSFETGREILNYDEYVREFAVENSSSGKPRRSIEASRDTAVVFVDLPRLVQSFLDVNQWKEMFPCLISKAATVDVICNGEGPGRNGAVQLMFAELQMLTPMVPTREVYFVRFCKQLSAEQWAIVDVSIDKVEDNIDASLVKCRKRPSGCIIEDKSNGHCKVIWVEHLECQKSAVHSMYRTIVNSGLAFGARHWIATLQLQCERLVFFMATNVPMKDSTGVATLAGRKSILKLAQRMTWSFCHAIGASSFHTWTKFTSKTGEDIRISSRKNLNDPGEPLGLILCAVCSVWLPVSPNVLFDFLRDETRRTEWDIMSSGGTVQSIANLAKGQDRGNAVAIQTIKSKENSVWILQDSYTNPYESMVVYASVDITGTQSVMTGCDSSNLAILPSGFSIIPDGLESRPLVISSRQEEKNTEGGSLFTMAFQILTNASPAAKLTMESVDSVNTLVSCTLRNIRTSLQCEDG

SEQ ID NO: 420 - DNA, 2463 bp, Glycine max
atgagttttgggggatttcttgagaccaaacaaagtggtggaggtggaggtaggatcgtagcagatattccttacagcaacaacagcaacaatataatgccctctagtgctatctcgcagcctcgtttagccactcctactttggtcaaatccatgttcaactcccctggtctttctcttgcacttcaaagtgatatagatggaaaaagggatgtgaacagattaatgcccgagaatttcgagcagaatggtttgagaaggaaccgggaagaggagcatgaaagcagatctggcagtgacaacatggatggtggttctggtgatgattttgatgctgccgacaacccaccgaggaaaaaacgctatcaccgacacactcctcagcaaattcaagagcttgaatcgctcttcaaggagtgtcctcacccggatgagaaacaaaggcttgaactcagcagaaggcttaatttggaaacgaggcaagtaaagttttggttccaaaatcgaagaacacaaatgaagacacaattggaacggcacgagaactcactcctaaggcaagagaatgacaagcttagagcagaaaacatgtctatgagggaagccatgaggaatccaatatgcacaaactgtggaggtcctgcaatgattggtgaaatttcactcgaagaacagcatcttagaattgagaatgctagattgaaggacgaactagaccgtgtttgtgcactcgctggcaagtttttaggtcgacccatttcatctctaacaggctcaattgggcctccattgccaaactcaagcttggagcttggtgttgggagcaatggttttggaggattaagcactgtgccttcaacaatgcctgattttggggttggaatatcaagccctttagctatggtgtcaccttcaagtactagaccaaccacaacagcaacaacaacattggtgactcctccttctggctttgacaacagatcaattgagaggtctattgttcttgaacttgctttggctgcaatggatgagttggtgaagatggctcagactgatgagcctctttggatcagaagcttggaaggtggaagagaaattctcaaccatgacgagtacacaaggactatcactccttgcattggcttgagacccaatggctttgtcactgaggcctctagacaaactggcatggtcatcataaacagcttggcccttgttgaaacattaatggactcaaatcgttggtcagagatgttcccttgtatgattgctagaacctcaaccgctgaagttatatctaatggaataaatggaactagaaatggtgcccttcagctaatgcatgctgagcttcaagttctttctcccttggttcctgttcgtgaggtcaattttctacgcttttgcaagcagcacgcagaggggttatgggcagtggtagatgtgtccatagataccatccgagacacttctggtgcacccacttttgtgaactgtaggaggcttccttctggttgcgtggtgcaagatatgccaaatggttactctaaggtgacatgggtggaacatgcagaatacgacgaaagccaaattcaccagctctatagacccttgttgagctcaggcatggggtttggtgcacaacgttgggttgccactcttcaacgccaatgcgagtgcctagctattctaatatcctcagcagttccctctagagaacattcagcaataagttcaggtggaaggagaagcatgttgaagctggcacagcgcatgacgaacaacttctgtgctggtgtgtgtgcctcaacagtgcacaagtggaacaagctgaacgcgggaaacgtgggggaggacgtgagggtgatgacgaggaagagcgtggatgaccccggtgaaccgccggggatcgtcctcagtgccgccacctcggtgtggcttcccgtctcgccacagaggctcttcgacttcctccgtgacgagcggctccggagtgagtgggacatcctctccaacggtggaccaatgcaagagatggctcacattgccaagggacaagaccatgctaactgtgtctccctccttagagccagtgctataaatgcgaaccagagcagcatgttgattctgcaagagacgtgcacagacgcgtcggggtcgcttgtggtgtacgcgccggtggacattccggcaatgcacgtcgtgatgaacggcggcgactctgcttacgtggcgcttcttccgtcggggttcgccatcgtgcccgacgggtccgtcgaggagaacggtggcgcgtcgcagcagagggcggcgagtggcgggtgcctcctgacggtggcgtttcagattctggtgaacagcctccccacggcgaagctcacggtggagtcggtggagacggtgaacaacctcatctcctgcaccgtgcagaagatcaaatcagcgcttcactgcgaaagctga

SEQ ID NO: 421 - protein, 820 aa, Glycine max
MSFGGFLETKQSGGGGGRIVADIPYSNNSNNIMPSSAISQPRLATPTLVKSMFNSPGLSLALQSDIDGKRDVNRLMPENFEQNGLRRNREEEHESRSGSDNMDGGSGDDFDAADNPPRKKRYHRHTPQQIQELESLFKECPHPDEKQRLELSRRLNLETRQVKFWFQNRRTQMKTQLERHENSLLRQENDKLRAENMSMREAMRNPICTNCGGPAMIGEISLEEQHLRIENARLKDELDRVCALAGKFLGRPISSLTGSIGPPLPNSSLELGVGSNGFGGLSTVPSTMPDFGVGISSPLAMVSPSSTRPTTTATTTLVTPPSGFDNRSIERSIVLELALAAMDELVKMAQTDEPLWIRSLEGGREILNHDEYTRTITPCIGLRPNGFVTEASRQTGMVIINSLALVETLMDSNRWSEMFPCMIARTSTAEVISNGINGTRNGALQLMHAELQVLSPLVPVREVNFLRFCKQHAEGLWAVVDVSIDTIRDTSGAPTFVNCRRLPSGCVVQDMPNGYSKVTWVEHAEYDESQIHQLYRPLLSSGMGFGAQRWVATLQRQCECLAILISSAVPSREHSAISSGGRRSMLKLAQRMTNNFCAGVCASTVHKWNKLNAGNVGEDVRVMTRKSVDDPGEPPGIVLSAATSVWLPVSPQRLFDFLRDERLRSEWDILSNGGPMQEMAHIAKGQDHANCVSLLRASAINANQSSMLILQETCTDASGSLVVYAPVDIPAMHVVMNGGDSAYVALLPSGFAIVPDGSVEENGGASQQRAASGGCLLTVAFQILVNSLPTAKLTVESVETVNNLISCTVQKIKSALHCES

SEQ ID NO: 422 - DNA, 2508 bp, Glycine max
atgagttttgggggttttttagacgacaaatcaggtagtggcggtgccagaatcaacaatttttcagatattccttacaataacaacaacgttaccaacaccaccaccaccaacaacaacaacaacgatagaatgccctttggtgcaatctctcagccacgcctcgtgaccacaactcccactttagccaaatccatgttcaactcaccagggctatctctggcacttcaaacgagtatagatggacaagaagatgtgaatagaatggctgagaatagcttcgaaccgaacggtttgagaagaagccgtgaagatgaacatgaaagcagatctggcagcgacaacatggacggcggttccggcgacgaacacgacgccgccgacaaccctccgaggaaaaaacgctatcaccgacacacccctcagcagatacaagaacttgaagcgttgttcaaggagtgtcctcatccagatgaaaagcaaaggcttgaactgagtagaaggctgtgtttggaaactcgtcaggtgaagttttggttccaaaatcgtcgaacccaaatgaagacccagttggagcggcacgagaacacgttgctgaggcaagagaacgacaagcttcgagcggagaacatgtccataagggacgcaatgaggaaccccatgtgctccaattgcggcggcctagccatcatcggcgagatttcgctggaggagcagcacctccgcatcgagaatgcgcgcctcaaagacgaacttgaccgcgtgtgtgcactcgcgggcaagttcttggggcgccccgtttcctccctgccgagtctagagctcggcatgggaggaaacgggttcgcaggaatgcctgcggcaacattgccgctggcacaagatttcgcaatgggtatgtctgtgtcaatgaataataatgcgttggctatggtgtctccaccgactagtactaggccggccgcggccggattcgataggtcggtggagaggtcgatgtttctcgagctagccttggctgctatggatgagttggtgaagatggcgcagactggggaacctctttggatgaggaatgttgaaggagggagggaaattttgaaccatgaggagtacgtgaggaacttcactccttccattggtttgagacccaatggttttgtgtctgaggcctctagggaaaatgggatggtcatcattaacagcttggcacttgttgagactcttatggactcgaatcggtgggcagagatgtttccttgtatcattgccagaacatccaccacggaagtgatatctagtggaattaacggaacaagaaatggagcacttcaattaatgcatgctgaacttcaagttctttcgcctttggtgccggttcgtgaggtgaatttcctacggttttgcaagcagcacgcagaagggttgtgggctgtggtggatgtgtccatagatagcatcagagaaagttcaggagcacccacttttgtgaacggtaggaggcttccttctggttgcgtggtgcaagatatgcccaatggttattccaaggtgacatgggtggagcatgcagaatacgaagaaagccaagttcaccagctctataggcctttgttgagctcaggcatggggtttggtgcccaacgttgggtggctacccttcaacgccaatgcgagtgccttgccattctaatgtcctcagcagcaccctctcgagaccattccgcaataacagcagggggaaggaggagcatggtgaagctggcgcagcggatgacgaacaacttctgcgcgggggtgtgcgcctcgacggtgcacaagtggaacaagctcaacgccgccgctaacgtcgacgaggatgtcagggtcatgacgcgcaagagcgtcgacgaccccggggagccgccggggatcgtcctcagcgccgccacctccgtctggctacccgtctccccccaccgcctcttcgacttcctccgcgacgagcgcctccgcagcgagtgggacatcctctccaacggtggccccatgcaggagatggcccacatcgccaagggccaagaccacggcaacgccgtctctctccttagagccagtgcgataaattccaaccagagtagcatgctgatactgcaggagacatgcatagacgcagcagggtcgcttgtggtgtacgcgccggtggatatcccagccatgcacgtggtgatgaacggtggcgattcggcttacgtggcgttgttaccttcagggttcgcgatcgtccccgatgggcctgggtctcgtgggcctcatcagaacgggcccacttcctcaacaacaacaacaacaaacggcggtgataacggcgtgacgcgcgtgagtgggtccctcctaacggtggcgtttcagatccttgtgaatagtctccctacggcgaagctcacggtagagtccgtggaaaccgtgaacaacctcatctcctgcaccgttcaaaagatcaaagccgcgctacactgcgaaagttaa

SEQ ID NO: 423 - protein, 835 aa, Glycine max
MSFGGFLDDKSGSGGARINNFSDIPYNNNNVTNTTTTNNNNNDRMPFGAISQPRLVTTTPTLAKSMFNSPGLSLALQTSIDGQEDVNRMAENSFEPNGLRRSREDEHESRSGSDNMDGGSGDEHDAADNPPRKKRYHRHTPQQIQELEALFKECPHPDEKQRLELSRRLCLETRQVKFWFQNRRTQMKTQLERHENTLLRQENDKLRAENMSIRDAMRNPMCSNCGGLAIIGEISLEEQHLRIENARLKDELDRVCALAGKFLGRPVSSLPSLELGMGGNGFAGMPAATLPLAQDFAMGMSVSMNNNALAMVSPPTSTRPAAAGFDRSVERSMFLELALAAMDELVKMAQTGEPLWMRNVEGGREILNHEEYVRNFTPSIGLRPNGFVSEASRENGMVIINSLALVETLMDSNRWAEMFPCIIARTSTTEVISSGINGTRNGALQLMHAELQVLSPLVPVREVNFLRFCKQHAEGLWAVVDVSIDSIRESSGAPTFVNGRRLPSGCVVQDMPNGYSKVTWVEHAEYEESQVHQLYRPLLSSGMGFGAQRWVATLQRQCECLAILMSSAAPSRDHSAITAGGRRSMVKLAQRMTNNFCAGVCASTVHKWNKLNAAANVDEDVRVMTRKSVDDPGEPPGIVLSAATSVWLPVSPHRLFDFLRDERLRSEWDILSNGGPMQEMAHIAKGQDHGNAVSLLRASAINSNQSSMLILQETCIDAAGSLVVYAPVDIPAMHVVMNGGDSAYVALLPSGFAIVPDGPGSRGPHQNGPTSSTTTTTNGGDNGVTRVSGSLLTVAFQILVNSLPTAKLTVESVETVNNLISCTVQKIKAALHCES

SEQ ID NO: 424 - DNA, 2346 bp, Glycine max
atgccagctggtattatgattccagcaagaaacatgccctcgatgattggaagaaacggaaccgttggtggctttggattatcttcagggctttctcttggccagattgaaaaccataaggcttcggaatctcaaagatctgaagaaatgttccagccaaacctgatggaagctggtcagctccacccactggacatgcctcagaacacttcagagagcgatgtcccaagaatccgtgaagatgactttgacagtgccaccaagtcaggtagtgaaaacctagaaggtgcttccggtgaagaccaagaccctcgtcccaacaagaagaaacgctaccaccgccacactcagcaccagatccaggagatggaagcgttctttaaggagtgtccgcaccctgatgataaacaaaggaaggagctgagtcgagagttagggttagagccattgcaggttaagttttggttccagaacaagcgcactcagatgaagacccaacatgaacgccatgagaacacacagctgagaactgaaaacgagaagcttcgagcagataacatgaggttcagggaagctctcggcaatgcctcgtgtcctaactgtggtgggccaaccgccattggggaaatgtcattcgatgaacatcacttgaggctcgaaaatgctcgcctgagagaagagattgataggatttctgccattgctgcaaagtatgttgggaagcctgtggtgagctatccacttgtttctccttcatctattcctccgcgcccactagagcttgggattggaggtggttttggtggccaacctggaggcactggtggggatatgtatggtggagctgcaggagatcttcttaggtcaataagtggacctactgaagctgataagccaatcataatagagcttgctgttgcagccatggaggagctcattggaatggcgcaaatgggtgagcctctctggttgactaccctggatggcacaactgtgctcaacgaggatgagtacatcaggtcctttcctcgagggattggtcctaaacctgctggtttcaagtttgaagcttcgagggaaacggctgttgttatcatgaaccatgttaaccttgttgagatcctcatggacgtgaaccaatggtccacagtgttcgctggcatagtctcaagagcaatgactttggaagtgttatcaacaggggtggcagggaattacaacggtgcattgcaagtgatgacagcagaagtgcaagtaccttcacctctggtgccaactcgagagagctattttgtgaggtattgtaagcagcacggtgacgggacttgggcagtagtggacgtgtcattggataatttgcgtcctagtccttctgccagatgtagaagaaggccctcaggttgcttaattcaagaaatgcccaatggctactcaaaggtcatatgggttgagcatgtagaagtggatgacagaggtgtccataatctatacaagcagcttgttagctctgggcatgcatttggggcaaaacgttgggttgcaaccttggatcgacaatgtgaaaggcttgctagtgccatggcaacaaacattcccacagtagatgttggagtgataacaaaccaagatgggaggaagagcatgttgaaacttgctgagagaatggttataagcttttgtgctggagtgagtgcatccactgcacacacatggacgacactttctggaactggtgctgatgatgtaagggtgatgacacgtaagagtgtagatgacccaggaaggcctcccggcatcgttctcagtgctgcaacttctttttggcttcctgtgtcaccaaaaagggtttttgaattcctccgcgatgagaactccagaagtgagtgggatattctttccaacggtggagttgtccaagaaatggcacacattgccaatggccgagacactggaaattgtgtctccctacttcgtgtgaatagtgcgaattcaagccaaagcaacatgttgatattacaagagagttgcgcggactcaacaggatcttttgtgatatatgctcctgtagatattgtggcaatgaacgtggttctgaatggaggggacccggactacgtggcccttcttccttcaggatttgctatactcccagatggaaccactgcacatggaggtggcattggtgacactggacatggtggttctctcttgactgtggcatttcaaatattggttgattcggttccaaccgcaaagctttctcttggatctgttgctactgttaacaatctcattgcctgcactgttgagagaattaaggctgctttatctggtgaagttgcttga

SEQ ID NO: 425 - protein, 781 aa, Glycine max
MPAGIMIPARNMPSMIGRNGTVGGFGLSSGLSLGQIENHKASESQRSEEMFQPNLMEAGQLHPLDMPQNTSESDVPRIREDDFDSATKSGSENLEGASGEDQDPRPNKKKRYHRHTQHQIQEMEAFFKECPHPDDKQRKELSRELGLEPLQVKFWFQNKRTQMKTQHERHENTQLRTENEKLRADNMRFREALGNASCPNCGGPTAIGEMSFDEHHLRLENARLREEIDRISAIAAKYVGKPVVSYPLVSPSSIPPRPLELGIGGGFGGQPGGTGGDMYGGAAGDLLRSISGPTEADKPIIIELAVAAMEELIGMAQMGEPLWLTTLDGTTVLNEDEYIRSFPRGIGPKPAGFKFEASRETAVVIMNHVNLVEILMDVNQWSTVFAGIVSRAMTLEVLSTGVAGNYNGALQVMTAEVQVPSPLVPTRESYFVRYCKQHGDGTWAVVDVSLDNLRPSPSARCRRRPSGCLIQEMPNGYSKVIWVEHVEVDDRGVHNLYKQLVSSGHAFGAKRWVATLDRQCERLASAMATNIPTVDVGVITNQDGRKSMLKLAERMVISFCAGVSASTAHTWTTLSGTGADDVRVMTRKSVDDPGRPPGIVLSAATSFWLPVSPKRVFEFLRDENSRSEWDILSNGGVVQEMAHIANGRDTGNCVSLLRVNSANSSQSNMLILQESCADSTGSFVIYAPVDIVAMNVVLNGGDPDYVALLPSGFAILPDGTTAHGGGIGDTGHGGSLLTVAFQILVDSVPTAKLSLGSVATVNNLIACTVERIKAALSGEVA

SEQ ID NO: 426 - DNA, 2166 bp, Glycine max
atggagtacggtagcggaggcggtgggtcacagtccccaggggagcaagatggctcagattcccaagagaggaggaagcgctatcatcgtcatactgccaatcagattcagaggcttgagtcaatgttcaaagagtgcccccatccggatgagaaacaaaggttgcaattaagcagggagttaggcctggccccgaggcagatcaagttctggttccaaaataggaggacccaaatgaaggcccaacacgaaagagctgacaattgtgctcttcgagctgacaatgacaagatacgttgcgagaacatagccatcagggaggccttgaagaatgttatctgcccttcttgtggtgccccacctctcaatgacgattgttattttgatgaccaaaagttgcgattagagaacgcccacctcaaagaagagcttgatagagtatctagcattgctgccaagtacattggaagaccaatttcccaactcccgccggtccagcctattcatatatcgtctctggacttatcaatggcgagttatggaaaccaagggatggttggtcctgctccttcttcccttaatcttgatcttcttcctgctgcagggacttcctcatcatccatgccttatcatcccccttgcctttcggacatggacaagtccctcatgtcagacattgcttccaatgccatggaagaatttctaaggctcgtgcagacaaacgaacccttgtggcttaaatcaaacgtcgatgctagagatgttcttagttgtgatgcctacgaaagaatgttccacaagcccaatactcgccccaagaatcctaacgttcgcattgaagcatcccgagattctggagttgtattaatgaatactttagctttggttgatatgtttatggacccaaacaagtggatacaactttttcccactattgtctctgtggcaaggactattcaagtcatatcttctgggatgatgggcagttgcagtggttctttacaattgatgtatcaagagttgcaagtgctttctccacttgtttcaactcgggagttttacttcctgcgttactgtcagcaaattgagcagggaacatgggcagtaatggacgtttcttatgattttccccaagatagccactatgctcctcaatttcggtctcatcgttgtccttctggttgcttgatccaggacatgcctgatgggcattccaagattacttgggttgaacacgtagagattgaagataagactcttcctcaccggctttatagaaatcttatttatagtgggatggcatttggagctgaaagatggcttactaccctccagaggatgtgtgaaagacttacttatctgatggctacaagcaatcctacccgggataatctaggaggagtaatttcatctcctgagggcaagaggagcatgatgaaacttgctcaaaggatggtcaccaatttttgtgccaacattagcacatcaagtggccatcgatggaccacgctctctggattgaatgaaatcgtagtaagagtcactgtccacaaaagctcagatcctggacaacctaatggtgtggtgctaagtgcagccactactatttggctccccacccctcctcacgctgtctttaatttcttcaaggatgaaaacaaaagacctcagtgggatgttctttccaacggtaatgccgttcaagaggttgccaacatagcaaatggtttgcaccctggtaacagtatatcagttcttcgagctttcaacaacagtactcagaacatgttaatactacaagaaagctgcatagattcctatggttcatttgtggtttattgcccagttgatctgccatccatcaacttagcaatgagtggtgaagacccttcatacattcccctactaccaaatggatttaccattttgcctgatggtcagcctgaccaggaaggagatgatggagcatcaaccagctctaacaacgcaaacaggaatatagtaaggtctggtggttcactagttacaattgcattccaaattcttgtgagcagcttgccatctgctaaactcaatatggagtcggtgacaactgttaacaatcttattggctccactgtccagcaaataaagtcttccttaagttgtcctaccctacctagctag

SEQ ID NO: 427 - protein, 721 aa, Glycine max
MEYGSGGGGSQSPGEQDGSDSQERRKRYHRHTANQIQRLESMFKECPHPDEKQRLQLSRELGLAPRQIKFWFQNRRTQMKAQHERADNCALRADNDKIRCENIAIREALKNVICPSCGAPPLNDDCYFDDQKLRLENAHLKEELDRVSSIAAKYIGRPISQLPPVQPIHISSLDLSMASYGNQGMVGPAPSSLNLDLLPAAGTSSSSMPYHPPCLSDMDKSLMSDIASNAMEEFLRLVQTNEPLWLKSNVDARDVLSCDAYERMFHKPNTRPKNPNVRIEASRDSGVVLMNTLALVDMFMDPNKWIQLFPTIVSVARTIQVISSGMMGSCSGSLQLMYQELQVLSPLVSTREFYFLRYCQQIEQGTWAVMDVSYDFPQDSHYAPQFRSHRCPSGCLIQDMPDGHSKITWVEHVEIEDKTLPHRLYRNLIYSGMAFGAERWLTTLQRMCERLTYLMATSNPTRDNLGGVISSPEGKRSMMKLAQRMVTNFCANISTSSGHRWTTLSGLNEIVVRVTVHKSSDPGQPNGVVLSAATTIWLPTPPHAVFNFFKDENKRPQWDVLSNGNAVQEVANIANGLHPGNSISVLRAFNNSTQNMLILQESCIDSYGSFVVYCPVDLPSINLAMSGEDPSYIPLLPNGFTILPDGQPDQEGDDGASTSSNNANRNIVRSGGSLVTIAFQILVSSLPSAKLNMESVTTVNNLIGSTVQQIKSSLSCPTLPS

SEQ ID NO: 428 - DNA, 2169 bp, Glycine max
atggagtttggaagtggttctcctggtgatcaccatcatcaccatgatggttcttctgattcccagagaaggaagaagcgttaccaccgtcacacagctaaccagattcagaggcttgaatctatgttcaaggagtgtccgcacccagatgagaagcagaggttgcagttgagtagggagttaggcttggcgcctagacagatcaaattttggttccagaacaggaggacccagatgaaggctcagcatgagagagctgataattgtgcactccgggcagagaatgacaagatacgttgtgagaacatagccataagggaagccttgaaaaatgttatctgcccctcttgtggtggtcctcctatgaatgatgattgttattttgatgaacagaagttgagattggagaatgcccaactcaaagaggagcttgatagagtatctagcattgcagctaagtacattggaaggccaatttctcaactcccacctgttcagcctattcacatatcttctctggacctgtcaatggggacttttgcaagccaagggttgggtggcccttcacttgatcttgatcttctccctgggagttcttcatcacccatgctgaatgtgcctcctttccaaccagcatgtctctcggacatggataagtccctcatgtcagacattgcctcaaatgccatggaggaaatgatcaggctattgcaaacgaatgagcccttgtggatgaaaggtgctgatgggagggatgtccttgatcttgattcctatgagagaatgttccccaaggctaatagtcacttgaagaaccccaatgttcatgttgaagcttctagagattcaggagttgtaattatgaacggcttaactttggttgacatgtttatggacccgaacaagtggatggagctatttcccaccattgtcacaatggctagaacaattgaggttatatcttctggaatgatgggtagccatagtggttctttgcaattgatgtatgaagagttgcaagtactttctccacttgtttctactagagagttctactttctgcgttactgtcagcaaattgaacaaggcttatgggcaatagtagatgtttcatatgatttccctcaagataatcaatttgctcctcaatatcgatcccatcgtcttccttctggtgtctttatccaagatatgcctaatggatattccaaggttacttggattgaacatgtagagattgaagacaaaactccagttcataggctctatagaaaccttatttatagtggcattgcatttggagcacaaagatggctaactacacttcagaggatgtgtgaaaggattgcttgtctaatggtgacaggcaattcaacccgtgatcttggaggagtgattccctctcctgagggcaagaggagcatgatgaaacttgcacaaagaatggtcaccaatttttgtgcaagcattagtgcatcagctggtcatagatggaccacactctctgggagtggcatgaatgagattggagtcagagtcactgtgcataagagctcagaccctggccaacctaatggtgtggtgctaagtgcagccaccaccatttggctccccatccctccacaaactgtgttcaatttctttaaggatgaaaagaaaaggcctcagtgggatgttctttccaatggcaatgctgtgcaagaggttgctcatatagcaaatggtccacaccctggtaactgcatatctgtgcttcgagcattcaactcaagtcaaaacaacatgctgatcctccaggagagctgtgtggactcctcaggttccctagtggtgtactgtccagttgatctgccagccatcaacatagcaatgagtggtgaggacccttcctacatccccctcctcccctcaggcttcaccatttccccggacggccaagctgaccaagacggcggaggagcctcgaccagcacaagcacaggcagcagggtcatggggggtggttctggtcctggttctggtggctcactcatcactgttgcattccaaatcctagtgagtagcttgccatctgccaaactcaacatggagtcggtgaccactgttaatagcctcatcggcaacactgtccaacacattaaggctgctttgaattgtcctagttcctga

SEQ ID NO: 429 - protein, 722 aa, Glycine max
MEFGSGSPGDHHHHHDGSSDSQRRKKRYHRHTANQIQRLESMFKECPHPDEKQRLQLSRELGLAPRQIKFWFQNRRTQMKAQHERADNCALRAENDKIRCENIAIREALKNVICPSCGGPPMNDDCYFDEQKLRLENAQLKEELDRVSSIAAKYIGRPISQLPPVQPIHISSLDLSMGTFASQGLGGPSLDLDLLPGSSSSPMLNVPPFQPACLSDMDKSLMSDIASNAMEEMIRLLQTNEPLWMKGADGRDVLDLDSYERMFPKANSHLKNPNVHVEASRDSGVVIMNGLTLVDMFMDPNKWMELFPTIVTMARTIEVISSGMMGSHSGSLQLMYEELQVLSPLVSTREFYFLRYCQQIEQGLWAIVDVSYDFPQDNQFAPQYRSHRLPSGVFIQDMPNGYSKVTWIEHVEIEDKTPVHRLYRNLIYSGIAFGAQRWLTTLQRMCERIACLMVTGNSTRDLGGVIPSPEGKRSMMKLAQRMVTNFCASISASAGHRWTTLSGSGMNEIGVRVTVHKSSDPGQPNGVVLSAATTIWLPIPPQTVFNFFKDEKKRPQWDVLSNGNAVQEVAHIANGPHPGNCISVLRAFNSSQNNMLILQESCVDSSGSLVVYCPVDLPAINIAMSGEDPSYIPLLPSGFTISPDGQADQDGGGASTSTSTGSRVMGGGSGPGSGGSLITVAFQILVSSLPSAKLNMESVTTVNSLIGNTVQHIKAALNCPSS

SEQ ID NO: 430 - DNA, 2202 bp, Glycine max
atggggaggatgagggacgatgagtacgagagccgttctggaagtgataactttgaaggcgcatctggtgatgatcaggatggtggtgatgatcagccacagaggaagaagagataccacagacacactcctcaccaaattcaagagcttgaggcttatgtggagtgccctcatcctgatgagaagcaaaggttggatctcagtaagaggcttggcttggagaataagcaagtcaagttctggtttcagaatcgacgaacccaaatgaagacccaactggaacgccatgagaacataatgcttaggcaggagaatgataagctcagagctgagaacagtttgatcaaggaagccatgtcaaatccagtgtgtaacaactgcggtggccctgcaattcctggccaaatttcatttgaggagcaccagattagaattgagaatgccagactaaaggatgaattgaaccgtatatgtgtcctagcaaacaagttccttggcaagccaatctcatcattgaccagtcccatggccctcacaacctcaaattctggtcttgaacttggtattggaaggaatgggattggtggttcaagcactcttggcactcccttgccaatggggcttgatttgggagatggagtgttaggcactcaacctgcaatgcctggggttagatcagcattgggtttgatgggaaatgaagttcagcttgagagatctatgcttatagatcttgcattggctgccatggaggaattactgaagatgactcaggcagagagccctctttggatcaagagtttggatggtgagaaggaaatctttaaccatgaggagtatgcaaggttgttttctccttgcattggtccaaaacccgctggctatgtaactgaagctacaagagaaactggaatagtaatcatcaacagtttagcccttgtggaaactttgatggacgcgaatcgatgggcagagatgtttccgtctatgattgctagagctatcaacctcgatgttatatctaatggcatgggtggaacaagaaatggtgctctacaagtgatgcatgctgaggttcaattgctttctccactagtccccgttcgtcaagtaagattcatcaggttctgtaagcagcatgcagaaggtgtatgggctgtagttgatgtttccattgagataggtcatgatgctgctaatgcacagccatccattagctgtagaaggcttccttctggctgtattgtgcaggatatgccgaatggttactccaaggttacttggcttgagcattgggagtacgatgagaatgttgtccaccaactttatcgcccgttgctaagttctggtgttggattcggtgctcatagatggattgccaccctccaaaggcagtgtgaatgcttggctatcctaatgtcctcttccatttcaagtgatagtcacacagcattgagccaagctggtaggagaagcatgttgaaattggcacaacgcatgactagcaacttctgttccggggtttgtgcttcgtcagctcgcaagtgggacagccttcacattgggactcttggtgatgacatgaaagtgatgacaaggaaaaacgtggatgaccctggtgagcctcctgggattgtgctcagtgctgcaacttctgtttggatgccagtgtcacggcaaaggctgttcgactttctgcgtgatgaacggctgagaagtgagtgggacatcttgtccaatggtggaccaatgcaggagatggtacatattgccaaaggacaaggacatggaaactgtgtttctcttctccgtgctaatgctgttaacgccaacgatagcagcatgctgattctgcaagagacatggatggacgcgtcatgctcagtggtggtatatgcacctgttgacgtgcaatcactgaacgtggtgatgagtggtggagattctgcatacgttgcactcttgccttcaggctttgcaattcttcccgatggccactgcaacgacaacggctgcaacgggagtctgcagaagggccgcggcagcgacgacggcagtggcggaagccttctcacagtcggtttccaaattctggtgaatagtctcccaacagcaaagctcacagtggagtcagtggacactgtgaataacctcatctcctgcaccattcagaagatcaaagctgcactcagagttgcatga

SEQ ID NO: 431 - protein, 733 aa, Glycine max
MGRMRDDEYESRSGSDNFEGASGDDQDGGDDQPQRKKRYHRHTPHQIQELEAYVECPHPDEKQRLDLSKRLGLENKQVKFWFQNRRTQMKTQLERHENIMLRQENDKLRAENSLIKEAMSNPVCNNCGGPAIPGQISFEEHQIRIENARLKDELNRICVLANKFLGKPISSLTSPMALTTSNSGLELGIGRNGIGGSSTLGTPLPMGLDLGDGVLGTQPAMPGVRSALGLMGNEVQLERSMLIDLALAAMEELLKMTQAESPLWIKSLDGEKEIFNHEEYARLFSPCIGPKPAGYVTEATRETGIVIINSLALVETLMDANRWAEMFPSMIARAINLDVISNGMGGTRNGALQVMHAEVQLLSPLVPVRQVRFIRFCKQHAEGVWAVVDVSIEIGHDAANAQPSISCRRLPSGCIVQDMPNGYSKVTWLEHWEYDENVVHQLYRPLLSSGVGFGAHRWIATLQRQCECLAILMSSSISSDSHTALSQAGRRSMLKLAQRMTSNFCSGVCASSARKWDSLHIGTLGDDMKVMTRKNVDDPGEPPGIVLSAATSVWMPVSRQRLFDFLRDERLRSEWDILSNGGPMQEMVHIAKGQGHGNCVSLLRANAVNANDSSMLILQETWMDASCSVVVYAPVDVQSLNVVMSGGDSAYVALLPSGFAILPDGHCNDNGCNGSLQKGRGSDDGSGGSLLTVGFQILVNSLPTAKLTVESVDTVNNLISCTIQKIKAALRVA

SEQ ID NO: 432 - DNA, 2199 bp, Glycine max
atgtttcacgcaaacatgtttgattctcaccctcacttgcttgatatgtcaccccacaagactactgcttgctctgagagtgatttgggaaaggcctgcagagatgatgagtacgagaccaaatctatcactgacgccatggacgctccttctggcgacgaccaagatcccaacccgcgacccaaaaagaagggttaccgccgccacacacagcgccaaatagaagaaatggaagccttcttcaagcagtttcctcacccggatgacaagcaaagaaaagagctgagccgtgagctggggttagagcctttgcaagtcaagttttggttccaaaacaagcgcacccagatgaagactcaacatgaacgaaatgagaatgctattttgaagacagaaaatgaaaagcttcgcgctgagaacaacaggtacaaggaggccctaagcaatgctacatgccccaactgcggaggctcagctgctcttggcgaaatgtccttcgacgagcaacacttgaggattgagaatgctcggttaagagaagagattgataggatttcaggaattgcggccaagtacgttggaaagccagtgacttcttcgtactccaacctttcatctctgaataacaaccacgtgcctgttggtaagtatggatcacagtcaggcacggtaggagaaatgtatggagggagtgacctttttaggtcactcccagctcctgctgatgctgacaaacccatgattgtggagcttgctgttgcagctatggaggaactcacaagactagctcaggctggagaccctttgtgggtccccagcaaccaccattctgagattctaaatgaagaggaatacttgaggactttccctaatagaggcttaggtcccaaacccttgggtttgagatctgaagcttcaagagaatcagtggtggtcatcatgaatcacattaaccttattgatatccttatggacgtgaaccaatggtcaactgtgttttgcggtattgtctcgagagcgttgacccttgaagtcctttcaactggagtagcaggaaactacaacggagccttgcaagtgatgtcatctgagttccaagtcccttcaccacttgttcctactcgtgagaactatttcgtaaggtactgtaagcagcaaccagatgggatatgggcagtggtggatgtttccttggataatctgcgacccaatacaatctcaagaagccgaagaaggccctctggttgtttaattcaagaattgccaaatggttactccaaggttacatggattgaacatgtagaagtggatgatagagcggtgcatagcatatatagacctctggttaactcgggcctggcatttggagctaaacgctgggtagctacattagacagacaatgcgaacgtcttgccagttcaatggccaacaacattccagcaggggacctatgtgtgataacgagtgctgagggaaggaaaagtatgatgaagctggcggagagaatggtaatgagctattgcactggtgttggtgcttctactgcacatgcttggacaacgctgtccgcaaccggatgtgatgacgtaagggtcatgacaagaaagagcaccgacgaacctggcaggccccccggtatagtgctcagtgctgccacttctttctggcttccggttcctccaaatagggtttttgattttctacgtgatgaaaactcaagaaatgagtgggacattctatccaacgggggtctagttcaagaattagcacatatagcaaatggtcgtgatcccggcaactgtgtctctttacttcgagtcaatagtgcaaattcaagccaaagcaatatgctgatacttcaagagagttgcacagattctactggctcatatgtagtttatgctcctgtggatattgttgctatgaatgttgtcttgagtggaggagatccagattatgttgccctgctcccctcgggctttgctattcttcctgatgggcctcctgcattaaatggtgggcccatgcatgaagttggatctggaggttctctactcacagttggattccagatcttagttgattcagctccaaccgcaaagttatctctgggttcagtggccactgttaacagtttaattaagtgcacagttgaaaggatcaaagttgcagtcatacgtgacaacaacaacacctga

SEQ ID NO: 433 - protein, 732 aa, Glycine max
MFHANMFDSHPHLLDMSPHKTTACSESDLGKACRDDEYETKSITDAMDAPSGDDQDPNPRPKKKGYRRHTQRQIEEMEAFFKQFPHPDDKQRKELSRELGLEPLQVKFWFQNKRTQMKTQHERNENAILKTENEKLRAENNRYKEALSNATCPNCGGSAALGEMSFDEQHLRIENARLREEIDRISGIAAKYVGKPVTSSYSNLSSLNNNHVPVGKYGSQSGTVGEMYGGSDLFRSLPAPADADKPMIVELAVAAMEELTRLAQAGDPLWVPSNHHSEILNEEEYLRTFPNRGLGPKPLGLRSEASRESVVVIMNHINLIDILMDVNQWSTVFCGIVSRALTLEVLSTGVAGNYNGALQVMSSEFQVPSPLVPTRENYFVRYCKQQPDGIWAVVDVSLDNLRPNTISRSRRRPSGCLIQELPNGYSKVTWIEHVEVDDRAVHSIYRPLVNSGLAFGAKRWVATLDRQCERLASSMANNIPAGDLCVITSAEGRKSMMKLAERMVMSYCTGVGASTAHAWTTLSATGCDDVRVMTRKSTDEPGRPPGIVLSAATSFWLPVPPNRVFDFLRDENSRNEWDILSNGGLVQELAHIANGRDPGNCVSLLRVNSANSSQSNMLILQESCTDSTGSYVVYAPVDIVAMNVVLSGGDPDYVALLPSGFAILPDGPPALNGGPMHEVGSGGSLLTVGFQILVDSAPTAKLSLGSVATVNSLIKCTVERIKVAVIRDNNNT

SEQ ID NO: 434 - DNA, 2229 bp, Glycine max
atggaaggccatagcgagatgggtctaatgggagaaagttttgatactagtaatttgctagggaggatgagggatgacgaatatgaaagccggtccggaagtgataattttgatggcggatctggtgatgatcaagatgctggggatgatcagccacataaaaagaagaagaaataccataggcacacccctcaacaaattcaggagcttgaagcgtttttcaaggagtgtcctcatcccgacgagaagcaaagaacagatcttagcaagaggcttggcttggagaacaagcaagtcaagttctggtttcagaatcgacgaacccaaatgaagacacaactggaacgccatgagaacatgattcttaggcaggaaaatgacaagctccgagctgagaacagtgtaatgaaggatgctttggcaaatccgatatgtaacaactgtggtggcccagctattcctggtcaaatttcattggaggagcaccaaactagaatggaaaatgcccgactgaaggatgaattgaaccgaatatgtgcattggcaaacaagttcctgggccggcccctctcaccactggccagtcccatggctctgccaccctcaaattctggtctagaacttgctattggaagaaacggacttggtggttcaagcaattttggcatgcccttgccaatgggatttgatgtgggagatggagctttgggctcctctcctgcgatgtctactatgggtgctagatcaccaatgggaatgatgggaaacgaaatccagcttgagagatccatgcttttagaccttgcactgagtgctatgaatgaattaattaagatggctcagcctgatacctctctttggattaaaagctctgatggcaggaatgaagtactgaaccatgatgagtatgcaagactgttttctccttatattggatcaaaacctgctgctggttatgtgactgaagctacaagaggaactggagtagtatcagccagcagtttgggccttgttgaaatattgatggatgcggatcaatggtcggagatgttttcatctatgattgctagtgctgccactgtggaagtactatctagtggcacgggtggaaccagaagtggagcgttgcaagtgatgcttgctgaggttcaattgctttctccactagtccctgctcgtcaagtgagtttcctcaggttttgcaagaagcacgctgaaggtttatgggctgtggttgatgtttcagttgacattggtcgtaatgttaccaattcacatccattaatgagctgcaggaggcttccctcgggctgtgttattcaggacatgcccaatggtttttccaatattacttgggttgaacattcccaatatgatgagagtgtcatccaccaactttatcgcccattggttagttctggcattggttttggtgctcagagatggattgccaccctcctaaggcagtgtgactgcttggcaatcctcaggtctcctcaaggcccatctgaggaccccacagcccaagcgggtaggacaaacatgatgaagctcgcacaacgcatgaccgagtgcttctgctcagggatctgtgcttcatctgcttgcaagtgggacatactgcacattggtaatctggctgatgacatgagaatcatggcccggaaaatcgatgacccaactgaggctcctggcattgtgctgagtgcttcaacttctgtttggatgccggtgtcacggaaaagggtgtttgattttctgcgtgatgaaaatttgagaggtgagtgggacctgctgtccaaagatggaccaatgaaggagatgctccatattgctaaaggacaagaccgtggaaattgtgtttccatccttcattctgctaatagcgagtgcaatgtgctatatctgcaagagtcatggagtgatgcctctggctcgatggtagtgtattccccgatcaacatgcaagccttgcagatggtgatgagctgtggagattcatcatttgtccctctccgtccatcaggctttgctattctgccagatggcacttcaaacaacggtgatggcagtgacggtggtggcagctgcttgcttacagttgggttacaaatgttgccaaatggcaaccaccaatcagccaagttcacaatggagtcagttgatgctgtcaataacctgatctcatttaccattcagaaggtcaaagatgcacttggagttgcatga

SEQ ID NO: 435 - protein, 742 aa, Glycine max
MEGHSEMGLMGESFDTSNLLGRMRDDEYESRSGSDNFDGGSGDDQDAGDDQPHKKKKKYHRHTPQQIQELEAFFKECPHPDEKQRTDLSKRLGLENKQVKFWFQNRRTQMKTQLERHENMILRQENDKLRAENSVMKDALANPICNNCGGPAIPGQISLEEHQTRMENARLKDELNRICALANKFLGRPLSPLASPMALPPSNSGLELAIGRNGLGGSSNFGMPLPMGFDVGDGALGSSPAMSTMGARSPMGMMGNEIQLERSMLLDLALSAMNELIKMAQPDTSLWIKSSDGRNEVLNHDEYARLFSPYIGSKPAAGYVTEATRGTGVVSASSLGLVEILMDADQWSEMFSSMIASAATVEVLSSGTGGTRSGALQVMLAEVQLLSPLVPARQVSFLRFCKKHAEGLWAVVDVSVDIGRNVTNSHPLMSCRRLPSGCVIQDMPNGFSNITWVEHSQYDESVIHQLYRPLVSSGIGFGAQRWIATLLRQCDCLAILRSPQGPSEDPTAQAGRTNMMKLAQRMTECFCSGICASSACKWDILHIGNLADDMRIMARKIDDPTEAPGIVLSASTSVWMPVSRKRVFDFLRDENLRGEWDLLSKDGPMKEMLHIAKGQDRGNCVSILHSANSECNVLYLQESWSDASGSMVVYSPINMQALQMVMSCGDSSFVPLRPSGFAILPDGTSNNGDGSDGGGSCLLTVGLQMLPNGNHQSAKFTMESVDAVNNLISFTIQKVKDALGVA

SEQ ID NO: 436 - DNA, 2190 bp, Glycine max
atgttccagccgaacctgatggacgcgttggagatgggtcagaacactcccgagagtgagattcctcgaatccgtgaggatgagttcgacagtgccaccaagtccggtagtgaaaaccatgaaggtgcctccggtgaagaccaagaccctcgtcccaacaaaaagaaacgttaccaccgccacacccaacaccagatccaagaaatggaagcttttttcaaggagtgtccgcacccagatgataagcaaaggaaggaactgagcagggaattagggttagagccattgcaggttaagttttggtttcagaacaagcgtactcagatgaagacacaacacgagcggcacgagaatacaaatcttagaaccgaaaacgagaagcttcgagcagataacatgaggtatagggaggcacttagcaatgcttcgtgtcccaattgtggtggaccaactgctataggagaaatgtcattcgatgaacatcacttgagacttgaaaacgcaaggctaagagaagagattgatcggatttcagcaattgctgcaaagtatgtagggaagcctgtggtgaattattcaaatatttctccttctctccctcctcgtccattagaaattggtgttggtggtgctggttttggaggccaaccagggattggtgtggacatgtatggagctggggatcttcttaggtcaatcagtggacccactgaagctgataagccaataatcatagagctagctgttgcagctatggaggagcttattggaatggcacaaatgggtgagcctctttggttaactacacttgatggcacatccactatgctcaatgaggatgagtacattaggtcttttcctcgaggtattggtccaaaacctagtggcttcaaatgtgaagcttcaagagaaactgctgttgttatcatgaaccatgtcaacctcgttgagattctcatggatgtgaaccaatggtccacagtgttctctggtatagtctcaagagccatgactctagaagtgttatcaacaggggttgccgggaactacaatggtgccttacaagtgatgacagcagaactacaactacctacaccacttgtgccaactcgtgagagttattttgtaaggtattgtaagcaacatggagatgggacttgggctgttgtggatgtttctttggataatttgcgcccaagtccttcagccagatgtagaagaaggccttctggctgcctaattcaagaaatgccaaatggctattcaaaggtcacatgggttgagcatgtggaagtggatgatagaggtgttcacaatctttacaagcagcttgttagctccggacatgcatttggtgcaaaacgtttggtagcaaccttagatcgacaatgtgaaagactcgctagtgccatggcaacaaacattcccactgtagatgttggtgtgataacaaaccaagaagggagaaaaagcatgatgaagctggctgaaagaatggtgataagcttttgtgctggagtgagtgcttccactgctcacacatggacaacactctcagggacaggtgctgatgatgtaagggttatgactcgaaagagtgtggatgaccctggaagaccccctggcattgttctcagtgctgccacttctttttggcttcctgttcctcctaaacgagtctttgacttcctccgtgacgaaaactctaggaatgagtgggatattctttccaatggtggagttgtccaagaaatggcacacattgcaaacggaagagacactggaaactgtgtatctctactacgagtaaatagtgcaaattcaagccagagcaacatgttgatattacaagagagttgcaccgattcaacaggctcttttgtaatttatgctccagtggacattgttgcgatgaatgtggttctaaacggtggagacccagattatgttgcacttcttccttcagggtttgctattctcccagatggaaccacatcgcatggaagtggtggtggcgtcattggcgaaactagccctagtagtggatctctcttaactgttgcctttcaaatattggtcgattctgttccaaccgctaagctttctcttggatctgtggccactgtcaacaatctcattgcatgcactgttgagagaatcaaggcttctttgtctggtgaacctgcttga

SEQ ID NO: 437 - protein, 729 aa, Glycine max
MFQPNLMDALEMGQNTPESEIPRIREDEFDSATKSGSENHEGASGEDQDPRPNKKKRYHRHTQHQIQEMEAFFKECPHPDDKQRKELSRELGLEPLQVKFWFQNKRTQMKTQHERHENTNLRTENEKLRADNMRYREALSNASCPNCGGPTAIGEMSFDEHHLRLENARLREEIDRISAIAAKYVGKPVVNYSNISPSLPPRPLEIGVGGAGFGGQPGIGVDMYGAGDLLRSISGPTEADKPIIIELAVAAMEELIGMAQMGEPLWLTTLDGTSTMLNEDEYIRSFPRGIGPKPSGFKCEASRETAVVIMNHVNLVEILMDVNQWSTVFSGIVSRAMTLEVLSTGVAGNYNGALQVMTAELQLPTPLVPTRESYFVRYCKQHGDGTWAVVDVSLDNLRPSPSARCRRRPSGCLIQEMPNGYSKVTWVEHVEVDDRGVHNLYKQLVSSGHAFGAKRLVATLDRQCERLASAMATNIPTVDVGVITNQEGRKSMMKLAERMVISFCAGVSASTAHTWTTLSGTGADDVRVMTRKSVDDPGRPPGIVLSAATSFWLPVPPKRVFDFLRDENSRNEWDILSNGGVVQEMAHIANGRDTGNCVSLLRVNSANSSQSNMLILQESCTDSTGSFVIYAPVDIVAMNVVLNGGDPDYVALLPSGFAILPDGTTSHGSGGGVIGETSPSSGSLLTVAFQILVDSVPTAKLSLGSVATVNNLIACTVERIKASLSGEPA

SEQ ID NO: 438 - DNA, 2346 bp, Glycine max
atgccagctggtattatgattccagcaagaaacatgccctcgatgattggaagaaacggaaccgttggtggctttggattatcttcagggctctctcttggccatattgaaaaccataaggcttcggaatctcaaagatctgtagaaatgttccagccaaacctgatggaagctggtcagctccacccactggacatgcctcagaacacttcagagagcgatgtccctagaatccgtgaagatgactttgacagtgccaccaagtcaggtagtgaaaatctagaaggtgcttccggtgaagaccaagaccctcgtcccaacaagaagaaacgctaccaccgccacactcagcaccagatccaggagatggaagcgttctttaaggagtgtccgcaccctgatgacaagcaaaggaaggagctgagtcgagagttagggttagagccattgcaggttaagttttggttccagaacaagcgcactcagatgaagacccaacatgaacgtcatgagaacacacagctgagaactgaaaacgagaagcttcgagcagataacatgaggttcagggaagctctcggcaatgcctcgtgtcctaactgtggtggaccaaccgctataggggaaatgtcattcgatgaacatcacttgaggctcgaaaatgctcgcctgagagaagagattgataggatatctgccattgctgcaaagtatgttgggaagcctgtggtgagctatccacttgtttctccttcatctgttcctcctcgtccactagaacttggggttagtggtggttttggtggccaacctggaggcattggaggggacatgtatggtggagctgcaggagatcttctaaggtcaataagtggacctactgaagctgataagccaatcataatagagcttgctgttgcagccatggaggagctcattggaatggcgcaaatgggtgagcctctttggttgactaccctggatggcaccactgtgctcaacgaggatgagtacatcaggtcttttcctcgagggattggtcctaaacccgttggtttcaagtgtgaagcttcgagggaaactgctgttgttatcatgaaccatgttaaccttgttgagatcctcatggacgtgaatcaatggtccacggtgttctctggcattgtctcaagagcaatgactttggaagtgctatcaacaggggtggcggggaattacaacggtgcattgcaagtgatgacagcagaagtgcaagtaccttcacctctggtgccaactcgagagagctattttgtaaggtattgtaagcagcacggtgacggaacttgggcagtagtggacgtgtccttggataatttgcgtcctagtccttcagccagatgtagaagaaggccctcaggttgcttaattcaagaaatgcccaatggctactctaaggtcatatgggttgagcacgtagaagtggatgacagaggtgtccataatctatacaagcagcttgttagctcggggcatgcatttggtgcaaaacgttggattgcaaacttggatcgacaatgtgaaaggcttgctagtgccatggcaacaaacattcccacagtagatgttggagtaataacaaacccagatgggaggaagagcatgttgaaactggctgagagaatggtcataagcttttgtgctggagtgagtgcatctactgcacacacatggacaacactttctggaactggtgccgatgatgtaagggtcatgacacgtaagagtgtagatgacccaggaaggcctcctggcatcgttctcagtgctgcaacttctttttggcttcctgtgtcaccaaaaagggtttttgaattcctccgcgatgagaactccagaagtgagtgggatattctttccaacggtggagttgttcaagaaatggcacacattgccaatggccgagacactggaaattgtgtctctctacttcgggtgaatagtgcgaattcaagccaaagcaacatgttgatattacaagagagttgcgcggactcaacgggatcttttgtgatatatgctcctgtagatattgtggcaatgaatgtggttctgaatggaggggacccggactacgtggcccttctcccttcaggatttgctatactcccagatgggaccactgcacatggaggtggcattggtgacattggacatggtggttctctcttgactgtggcatttcaaatattggttgattcggttccaacggcaaagctttctcttggatcagttgctactgttaacaatctcattgcctgcactgttgagagaattaaggctgctttatctggtgaagttgcttga

SEQ ID NO: 439 - protein, 781 aa, Glycine max
MPAGIMIPARNMPSMIGRNGTVGGFGLSSGLSLGHIENHKASESQRSVEMFQPNLMEAGQLHPLDMPQNTSESDVPRIREDDFDSATKSGSENLEGASGEDQDPRPNKKKRYHRHTQHQIQEMEAFFKECPHPDDKQRKELSRELGLEPLQVKFWFQNKRTQMKTQHERHENTQLRTENEKLRADNMRFREALGNASCPNCGGPTAIGEMSFDEHHLRLENARLREEIDRISAIAAKYVGKPVVSYPLVSPSSVPPRPLELGVSGGFGGQPGGIGGDMYGGAAGDLLRSISGPTEADKPIIIELAVAAMEELIGMAQMGEPLWLTTLDGTTVLNEDEYIRSFPRGIGPKPVGFKCEASRETAVVIMNHVNLVEILMDVNQWSTVFSGIVSRAMTLEVLSTGVAGNYNGALQVMTAEVQVPSPLVPTRESYFVRYCKQHGDGTWAVVDVSLDNLRPSPSARCRRRPSGCLIQEMPNGYSKVIWVEHVEVDDRGVHNLYKQLVSSGHAFGAKRWIANLDRQCERLASAMATNIPTVDVGVITNPDGRKSMLKLAERMVISFCAGVSASTAHTWTTLSGTGADDVRVMTRKSVDDPGRPPGIVLSAATSFWLPVSPKRVFEFLRDENSRSEWDILSNGGVVQEMAHIANGRDTGNCVSLLRVNSANSSQSNMLILQESCADSTGSFVIYAPVDIVAMNVVLNGGDPDYVALLPSGFAILPDGTTAHGGGIGDIGHGGSLLTVAFQILVDSVPTAKLSLGSVATVNNLIACTVERIKAALSGEVA

SEQ ID NO: 440 - DNA, 2184 bp, Glycine max
atgttccagccgaacctgatggacgcgttggagatgggtcagaacacttccgagagtgaggttcctcgaatcctagaagacgagttcgacagtgccaccaagtccggtagtgaaaaccatgaaggtgcctctggtgaagaccaagaccctcgtcccaacaaaaagaagcgttaccaccgccacacccaacaccagatccaagaaatggaagcttttttcaaggagtgtccgcacccagatgacaagcaaaggaaggaactgagcagggagttagggttagagccattgcaggttaagttttggtttcagaacaagcgtactcagatgaagacacagcacgagcggcatgagaatacaaatctcagaaccgaaaacgagaagcttcgagcagataatatgaggtatagggaggctcttagcaatgcttcgtgtcctaattgtggtggaccaaccgctataggagaaatgtcattcgatgaacatcacttgaggcttgaaaacgcaaggctaagagaagagattgatcgcatctcagcaattgctgcaaagtatgtagggaagccagtggtgaactattcaaatatttctccttctctccctcctcgtccgttagaactaggggttggtggtgctggttttggaggccaaccagggattggtgtggacatgtatggagctggggatcttcttaggtcaattagtggacccactgaagctgataagccaataatcatagagctagctgttgcagctatggaggagctcattgggatggcacaaatgggtgagcctctttggttaactacccttgatggcacatccactatgctcaatgaggatgagtacattaggtcttttcctcgagggattggtccaaaacctagtggcttcaaatgtgaagcttcaagagaaactgctgttgttatcatgaaccatgtcaacctcgttgagattctcatggatgtgaaccaatggtccacagtgttctctggtatagtctcaagagccatgactctggaagttctatcaacaggggtggctgggaactacaatggtgccttacaagtgatgacagcagaactacaactacctacaccacttgtgccaactcgcgagagttattttgtgaggtattgtaagcaacatgcagatgggacttgggcagttgtggatgtttctttggataatttgcgcccaggtccttcagccagatgtagaagaaggccttctggttgcttaattcaagaaatgccaaatggctattcaaaggtcacatgggttgagcatgtagaagtggatgatagaggtgttcacaatctttacaagcagcttgttagctctggacatgcatttggtgcaaaacgttgggttgcaaccttagatcgacaatgtgaaagactcgctagtgccatggcaacaaacattcccactgtagatgttggcgtgataacaaaccaagacgggagaaagagcatgatgaagctggctgaaagaatggtgataagcttttgtgctggagtgagtgcttccactgctcacacatggacaacactctctgggaccggtgctgatgatgtaagggttatgaccagaaagagtgtggatgaccctggaagaccccctggcatagttctcagtgctgccacttctttttggcttcctgttccacctaaacgagtctttgacttcctccgtgacgaaaactctaggaatgagtgggacattctttccaatggaggagttgtccaagaaatggcacacattgcaaacggaagagacacaggaaactgtgtatctctacttcgagtaaatagtgcaaattcgagccagagcaacatgttgatattacaagagagttgcaccaattcaacaggctcttttgtcatttatgctccggtggacattgttgcaatgaatgtggttctaaatggtggagacccagattacgtggcacttcttccttcagggtttgctattctccctgatggaaccacatcgcataatggaagtggtggcattggcgaaactggccctagtggttctctcttaaccgttgcgtttcaaatattggtggattctgttccaaccgcgaagctttctcttggatctgtggccactgtgaacaatctcattgcatgcactgttgagagaatcaaggcttctttgtctggtgaacctgcttga

SEQ ID NO: 441 - protein, 727 aa, Glycine max
MFQPNLMDALEMGQNTSESEVPRILEDEFDSATKSGSENHEGASGEDQDPRPNKKKRYHRHTQHQIQEMEAFFKECPHPDDKQRKELSRELGLEPLQVKFWFQNKRTQMKTQHERHENTNLRTENEKLRADNMRYREALSNASCPNCGGPTAIGEMSFDEHHLRLENARLREEIDRISAIAAKYVGKPVVNYSNISPSLPPRPLELGVGGAGFGGQPGIGVDMYGAGDLLRSISGPTEADKPIIIELAVAAMEELIGMAQMGEPLWLTTLDGTSTMLNEDEYIRSFPRGIGPKPSGFKCEASRETAVVIMNHVNLVEILMDVNQWSTVFSGIVSRAMTLEVLSTGVAGNYNGALQVMTAELQLPTPLVPTRESYFVRYCKQHADGTWAVVDVSLDNLRPGPSARCRRRPSGCLIQEMPNGYSKVTWVEHVEVDDRGVHNLYKQLVSSGHAFGAKRWVATLDRQCERLASAMATNIPTVDVGVITNQDGRKSMMKLAERMVISFCAGVSASTAHTWTTLSGTGADDVRVMTRKSVDDPGRPPGIVLSAATSFWLPVPPKRVFDFLRDENSRNEWDILSNGGVVQEMAHIANGRDTGNCVSLLRVNSANSSQSNMLILQESCTNSTGSFVIYAPVDIVAMNVVLNGGDPDYVALLPSGFAILPDGTTSHNGSGGIGETGPSGSLLTVAFQILVDSVPTAKLSLGSVATVNNLIACTVERIKASLSGEPA

SEQ ID NO: 442 - DNA, 2196 bp, Glycine max
atgtttgacacaaacatgtttgattctcaccctcacttgcttgatatgtcaccaccccacaagactacttgctctgagagtgatttggcaaagccctgcagagatgatgagtacgagaccaaatctatcactgacaccatggacgctccttctggcgacgaccaagatcccaacccgcgacccaaaaagaagggttaccgccgccacacacagcgccaaattgaagaaatggaagccttcttcaagcagtgtcctcacccggatgacaagcaaagaaaagagctgagccgtgagctggggttagagcctttgcaagtcaagttttggttccaaaacaagcgcacccagatgaagactcaacatgaacgaaatgaaaatgctattttgaaggcagagaatgaaaagcttcgcgctgagaacagcaggtacaaggaggccctaaccaatgctacatgccccaactgtggaggcccagctgctcttggcgaaatgtccttcgacgagcaacacttgaggattgagaatgctcggttaagagaagagatcgataggatttcaggaattgctgccaaatatgttggaaagccagtgacttcttcgtactccaacctctcatctctgaataacaaccacgtgcctgtcggtaactatggatcacaatcaggcacggtaggagaaatgtatggaggcagtgacctttttaggccactcccagctcctgctgatgctgacaaacccatgattgtggagcttgctgttgcagctatggaggaactcacaagactagctcaggctggagagcctttgtgggtcccaagcaaccaccattctgagattctaaatgaagatgaatacttgaggactttccctactagaggtttaggacccaaacccttgggcttgagatcagaagcttcaagggaatccgtggtggtcatcatgaatcacattaaccttattgatatccttatggatgtgaatcaatggtcaactgtgttttgcggtattgtctcgagagcattgacccttgaagtcctttcaactggaatagcaggaaactacaacggagccttgcaagtgatgtcatctgagttccaagtcgcttcaccacttgttcctactcgtgagaactatttcgtaaggtactgtaagcagcaaccagatgggatatgggcagtggtggatgtttccttggataatctgcgacccagtacaatctcaagaagccgaagaaggccctctggttgtttaattcaagaattgccaaacggttactccaaggttacatggattgaacatgtggaagtggatgatagagcagtgcatagcatatatagaactctggttaattcgggcctggcctttggagctaaacgctgggtagctacattagaaagacaatgcgaacgtcttgccagttcaatggccaacaacataccagcaggggacctctgtgtgataacgagtgctgagggaaggaaaagtatgatgaagctggcggagagaatggtaatgagctattgcactggtgttggtgcttctaccgcgcatgcttggacaacgctctccgcaactggatgtgatgatgtaagggtaatgacaagaaagagcaccgacgaacctggcagaccccccggtatagtgctcagtgctgccacttctttttggcttcctgttcctccaaagagggtttttcatttcctacgtgatcaaaactcaagaaatgagtgggacattctctccaacgggggtctagttcaagaattggcacatatagcaaatggtcgtgatcccggcaactgtgtctctttacttcgagtcaatagtgcaaattcaagccaaagcaacatgctgatacttcaagagagttgcacagattcaactggctcatatgtagtttatgctcctgtggatattgttgctatgaatgttgtcttgagtggaggggatccagactatgttgccctgctcccctcgggctttgctattctacctgatgggcctcctgcattaaacggtgggcccatacatgatgttgggtctggaggttctctactcacagttgcattccagatcttagttgattcagccccaactgcaaagctatctctgggttcagtcgccactgttaacagtttaattaagtgcacagttgaaaggatcaaagttgcagtcatacgtgacaacaccacctga

SEQ ID NO: 443 - protein, 731 aa, Glycine max
MFDTNMFDSHPHLLDMSPPHKTTCSESDLAKPCRDDEYETKSITDTMDAPSGDDQDPNPRPKKKGYRRHTQRQIEEMEAFFKQCPHPDDKQRKELSRELGLEPLQVKFWFQNKRTQMKTQHERNENAILKAENEKLRAENSRYKEALTNATCPNCGGPAALGEMSFDEQHLRIENARLREEIDRISGIAAKYVGKPVTSSYSNLSSLNNNHVPVGNYGSQSGTVGEMYGGSDLFRPLPAPADADKPMIVELAVAAMEELTRLAQAGEPLWVPSNHHSEILNEDEYLRTFPTRGLGPKPLGLRSEASRESVVVIMNHINLIDILMDVNQWSTVFCGIVSRALTLEVLSTGIAGNYNGALQVMSSEFQVASPLVPTRENYFVRYCKQQPDGIWAVVDVSLDNLRPSTISRSRRRPSGCLIQELPNGYSKVTWIEHVEVDDRAVHSIYRTLVNSGLAFGAKRWVATLERQCERLASSMANNIPAGDLCVITSAEGRKSMMKLAERMVMSYCTGVGASTAHAWTTLSATGCDDVRVMTRKSTDEPGRPPGIVLSAATSFWLPVPPKRVFHFLRDQNSRNEWDILSNGGLVQELAHIANGRDPGNCVSLLRVNSANSSQSNMLILQESCTDSTGSYVVYAPVDIVAMNVVLSGGDPDYVALLPSGFAILPDGPPALNGGPIHDVGSGGSLLTVAFQILVDSAPTAKLSLGSVATVNSLIKCTVERIKVAVIRDNTT

SEQ ID NO: 444 - DNA, 2142 bp, Glycine max
atggagtacggtgggtcgcagtccccaggggagcaagatggttcggattcccaagagaggaggaaacgctatcatcgtcatactgccaatcagattcagaggcttgagtcaatgttcaaagagtgcccccatccagatgagaaacaaaggttgcaattaagcagggagttaggcctggccccgaggcagattaagttctggttccaaaataggaggacccaaatgaaggcccaacacgaaagagctgacaattgtgctcttcgagctgacaatgacaagatacgttgcgagaacatagccatcagggaggccttgaagaacgttatctgcccttcttgtggtggcccacctctcaatgacgattcttattttaatgaccataagttgcgattagagaatgcccacctcaaagaagagcttgatagagtgtctagcattgctgccaagtacattggaagaccaatttcccaactcccgccggtccagcctattcatatatcgtctctggacttatcaatggcgagttttggaaaccaagggatggttggtccggctcctgctccttcccttaatcttgatcttcttcctgctgggacttcctcatccatgccaaatttgccttatcagcctccttgcctttcggacatggacaagtctctcatgtcagacattgcctccaatgccatggaagaatttctcaggctcgtgcagacaaatgaacccttgtggcttaaatcaaacgtcgaccgtagagatgttcttagttctgatgcctatgatagaatgttctccaagcccaatactcgctccaagaatcctaatgttcgaattgaagcatcccgagattctggagtcgtattactgaatagtttagctttggttgatatgtttatggacccaaacaaatggatccaactttttcccacaattgtctcagtggcaaggactattcaagtcatatcttctggggtcatgggcagttgcagtggttctttacaattgatgtatcaagagttgcaagtgctttctccacttgtttcaactcgggagttttacttcctgcgttactgtcagcaaattgagcagggcacatgggcagtaatggacgtttcttatgattttccccaagatagccactttgctcctcagtttcggtctcatcgttgtccttctggttgcttgatccaggacatgcctgatgggcattccaagattacttggattgaacacgtagagattgaagataaaactcttcctcatcggctttatagaaatcttatttatagtgggatggcatttggagctgaaagatggcttactaccctccagaggatgtgtgaaagatttacttatctgatggctacaagcaatcctacccgggataatcttggaggagtaatttcatctcctgagggcaagaggagcatgatgaaacttgctcaaaggatggtcaccgatttttgtgccagcattagcacatcaagtggccatcgatggaccacgctctctgggttgaatgaaatcgtagtaagagtcactgtccacaaaagctcagatcctggacaacctaatggtgtggtgctaagtgcagccactaccatttggctccccacccctccacacactgtctttaatttcttcaaggatgaaaacaaaagacctcagtgggatgttctttccaacggtaatgccgttcaagaggttgccaacatagcaaatggtttgcaccctggtaactgtatatcagttcttcgagctttcaacaacagtcagaacatgttaatactacaagaaagctgcatagattcctatggttcacttgtggtttattgcccagttgatctgccatccatcaacacagcagtaagtggtgaagacccttcatacattcccctactaccaaatggatttaccattttgcctgatggtcagcctgaccaggaaggagatggagcatcaactagctcaaacacaaacaggaatatagcaaggtctggtggttcactagttacaattgcattccaaattctagtgagcagcttgccatctgctaaggtcaatatggagtcggtgacaactgttaacaatcttattggctccactgtccagcaaataaagtcttccctaagttgtcctacctag

SEQ ID NO: 445 - protein, 713 aa, Glycine max
MEYGGSQSPGEQDGSDSQERRKRYHRHTANQIQRLESMFKECPHPDEKQRLQLSRELGLAPRQIKFWFQNRRTQMKAQHERADNCALRADNDKIRCENIAIREALKNVICPSCGGPPLNDDSYFNDHKLRLENAHLKEELDRVSSIAAKYIGRPISQLPPVQPIHISSLDLSMASFGNQGMVGPAPAPSLNLDLLPAGTSSSMPNLPYQPPCLSDMDKSLMSDIASNAMEEFLRLVQTNEPLWLKSNVDRRDVLSSDAYDRMFSKPNTRSKNPNVRIEASRDSGVVLLNSLALVDMFMDPNKWIQLFPTIVSVARTIQVISSGVMGSCSGSLQLMYQELQVLSPLVSTREFYFLRYCQQIEQGTWAVMDVSYDFPQDSHFAPQFRSHRCPSGCLIQDMPDGHSKITWIEHVEIEDKTLPHRLYRNLIYSGMAFGAERWLTTLQRMCERFTYLMATSNPTRDNLGGVISSPEGKRSMMKLAQRMVTDFCASISTSSGHRWTTLSGLNEIVVRVTVHKSSDPGQPNGVVLSAATTIWLPTPPHTVFNFFKDENKRPQWDVLSNGNAVQEVANIANGLHPGNCISVLRAFNNSQNMLILQESCIDSYGSLVVYCPVDLPSINTAVSGEDPSYIPLLPNGFTILPDGQPDQEGDGASTSSNTNRNIARSGGSLVTIAFQILVSSLPSAKVNMESVTTVNNLIGSTVQQIKSSLSCPT

SEQ ID NO: 446 - DNA, 2349 bp, Glycine max
atgtcaagtatgggagggaacgtagtagtaaactcagacactctcttctcctcctcgatccagaactctagcttcaacttcatccccaccatgccctttcaaccttttccttccatgaaagaagaagatgggatcttgcgagggaaggaagagatggaaagtggatcaggaagtgaacaattagttgaagacaaatcagggtatgaacaagagagtcatgaagaacccacaaagaagaaacgttatcacaggcacactgctcgccagatccaagaaatggaatctttgttcaaggaatgcccacaccctgatgataagcagaggctgaaactgagccatgaattgggtcttaaaccgcgccaggtcaagttctggttccagaaccgtcgaacccagatgaaggcacaacaagaccgggcagataatatgatacttagagctgagaatgagactctaaagagtgagaattatcggttacaagctgcactgcgtaacgttatttgtcccaactgtggtggcccgtgcataatgggtgctgatatgggtttcgatgaacaccaacttcgcattgaaaatgctcgtttaagagaagagttagaacgcgtgtgttgtctcactacaagatacactgggcgtccaatacaaacaatggcagcagatcctactctaatggccccttcattggatttggacatgaacatgtacccaaggcacttttcggatcccattgctccatgcacagaaatgattcctgtgccaatgttgcctcccgaagcttcaccgttttctgagggtggtgttttaatggaagaagagaagtctctggccttggagcttgcggcttcctctatggctgaacttgtgaagatgtgtcagacaaatgaaccactttggatccaaagcagtgagggtgaaagggaagtgctcaattttgaagagcatgcaagaatgtttgtttggcctcagaatctcaagaaccgaagtgagctaaggacagaagctagccgtgacacttctgtggttataattaatagtgtcactcttgttgatgctttccttgatgctcaaaaatggatggaattgtttcctacaatcgtttcaagagcaaaaactgtccaaatcatatcttctggtgcttccggtcttgcaagcgggactcttcagctgatgtgcgcagaattccaagttctttctcctttggtgtccactcgtgagactcattttcttcgatattgtcaacaaaatgctgaggagggaacctgggccattgttgattttcctgttgatagctttcaccaaaattttcacccttcttaccctagatactgcaggaggtcctctggctgcgttattcaagatatgccaaatgggtattcaagggtaacatgggtggagcatgcaaaagtagaagagaaacctgtgcatcagatattctgcaattatgtgtacagtggaatggcatttggagcacagcgttggttaggagttttgcagagacaatgtgaaagggtcgcaagcctcatggccagaaacatatcagatcttggagtgataccttcgccagatgcgcgaaagaacttgatgaaactagcccaaagaatgataaaaacgtttagccttaatatgagtacctctggtggtcaatcatggacagccatatcagattcccctgaagacactgttagaatcacaactaggaaaatcacagagcctggccaacctaatggcgtgattctaagtgcagtttcaaccacttggttgccctattctcacaccaaggtctttgatctcctcagggatgaacgccacagatctcagatggatactctttcaaacgggaactcattgaatgaagtggctcatattgcaaatggctcacatccaggaaactgcatttctcttcttcgcataaatgtagcaagcaactcatcccagaacgtagagctaatgctgcaagagagttgcaccgaccaatctggaagcctagtagtgtacacaaccatcgacgtggatgcgatccagctagccatgagtggcgaggacccttcttgcattgcacttcttccccaaggcttcaagatagtgccaatgctatcatcacccatcaccgatacaacaaactcatcagagcctccaatatctctcaacaacaactcaggtggttgcctcttaacaatgggggtgcaggttctcgcgagcacaatcccttctgcaaagctcaacctctcgagcgtcaccgccatcaacaaccacctttgcaacaccttgcaccagattgaagctgctctttcttctactaactcccatgagaacggcttcttcctttgcactgaacccaccaagcagtga

SEQ ID NO: 447 - protein, 782 aa, Glycine max
MSSMGGNVVVNSDTLFSSSIQNSSFNFIPTMPFQPFPSMKEEDGILRGKEEMESGSGSEQLVEDKSGYEQESHEEPTKKKRYHRHTARQIQEMESLFKECPHPDDKQRLKLSHELGLKPRQVKFWFQNRRTQMKAQQDRADNMILRAENETLKSENYRLQAALRNVICPNCGGPCIMGADMGFDEHQLRIENARLREELERVCCLTTRYTGRPIQTMAADPTLMAPSLDLDMNMYPRHFSDPIAPCTEMIPVPMLPPEASPFSEGGVLMEEEKSLALELAASSMAELVKMCQTNEPLWIQSSEGEREVLNFEEHARMFVWPQNLKNRSELRTEASRDTSVVIINSVTLVDAFLDAQKWMELFPTIVSRAKTVQIISSGASGLASGTLQLMCAEFQVLSPLVSTRETHFLRYCQQNAEEGTWAIVDFPVDSFHQNFHPSYPRYCRRSSGCVIQDMPNGYSRVTWVEHAKVEEKPVHQIFCNYVYSGMAFGAQRWLGVLQRQCERVASLMARNISDLGVIPSPDARKNLMKLAQRMIKTFSLNMSTSGGQSWTAISDSPEDTVRITTRKITEPGQPNGVILSAVSTTWLPYSHTKVFDLLRDERHRSQMDTLSNGNSLNEVAHIANGSHPGNCISLLRINVASNSSQNVELMLQESCTDQSGSLVVYTTIDVDAIQLAMSGEDPSCIALLPQGFKIVPMLSSPITDTTNSSEPPISLNNNSGGCLLTMGVQVLASTIPSAKLNLSSVTAINNHLCNTLHQIEAALSSTNSHENGFFLCTEPTKQ

SEQ ID NO: 448 - DNA, 1890 bp, Glycine max
atgggcgccgacatgtccaacaataataatcctcctcccacttctcacgccaaagacttgtttgcttctccagctctctctctcagcctcgctggcatttttcgccatgctggggtggccgcggctgatgaggctgccacttctgtggaggagggcgaagaagggagtggaggagctgctgagaggttagaggagattagcagcgagaactccggccccacgagatccagatcagaggatgacttcgaaggaggagaagctgaacctgaagatgatgacgatgcccatggagacaacaagaacaagaagacgaagaagaagaggaagaaatatcacaggcacactgctgaccagatcagagaaatggaagcgcttttcaaagagtcaccacatcctgatgaaaagcagaggcaacaactaagcaagcaattaggccttgccccaaggcaagtcaagttttggttccaaaatcgtcgaacccaaatcaaggcaatacaagagcgtcatgaaaattctttgttgaagtcagaaatagagaaactaaaggagaaaaataagagcttacgagagaccataaacaaagcttgttgccccaactgtggcgtgcccaccacaagcagagatggtgtcatgccaactgaagaacaacaactacgtattgaaaatgccaaactcaaagctgaggtagagaaactccgagcagctttagggaaatacgcaccagggtcaacgtccccttcatgttcttctggccatgaccaagagaatagaagctctttggatttttacactggaatttttggacttgataagtcaaggataatggacatagtaaaccaagcaatggaggagctcattaagatggctaccgtgggggaaccattatggcttcgtagcttcgagactggtcgcgaaattcttaactatgatgaatatgttaaggagtttgcagttgaaaattcaagcagtagtggaaagccaaagagatccattgaagcctcaagagacactgcagttgtttttgtggatctccctagtcttgtccaaagttttctagacgtgaatcagtggaaggaaatgtttccgtgtttgatatctaaggcggcaactgttgatgttatatgcaatggagagggtcttagcaggaatggtgcagtgcaactgatgtttgctgagcttcaaatgctgactcctatggttcccacaagagaagtctattttgttcgtttctgcaagcagttgagtgctgaacagtgggcaatcgttgatgtatccatagacaaagtagaagacaacattgacgcgtccctcgtgaaatgcagaaaacgcccttctggttgcattattgaggacaagtccaatggccattgcaaagtaatatgggtggagcactcggaatgccagaagagtgcagtccattcaatgtatcgcaccattgtgaacagtggcctagcttttggggccaggcattggattgcgactcttcaacttcaatgtgaacgtctagttttcttcatggcaacaaatgttcccatgaaggattcaaccggtgttgccaccttggccgggagaaaaagcattctgaagttggcacaaagaatgacatggagtttctgccatgcaattggcgcgtcaagcatccacgcatggactaaggttacaagtaaaactggagaagacataaggataagttctagaaagaacttgaacgatcctggtgaacctcttgggttgatattgtgcgctgtttgttctgtatggttgcctgtctcacctaatgttctgtttgatttcttgagggatgaaaatcgccgaactgaagtaccactctcttgtctcctttccttcttaacccttttgtcaattttggttaataatttgaatggttaa

SEQ ID NO: 449 - protein, 629 aa, Glycine max
MGADMSNNNNPPPTSHAKDLFASPALSLSLAGIFRHAGVAAADEAATSVEEGEEGSGGAAERLEEISSENSGPTRSRSEDDFEGGEAEPEDDDDAHGDNKNKKTKKKRKKYHRHTADQIREMEALFKESPHPDEKQRQQLSKQLGLAPRQVKFWFQNRRTQIKAIQERHENSLLKSEIEKLKEKNKSLRETINKACCPNCGVPTTSRDGVMPTEEQQLRIENAKLKAEVEKLRAALGKYAPGSTSPSCSSGHDQENRSSLDFYTGIFGLDKSRIMDIVNQAMEELIKMATVGEPLWLRSFETGREILNYDEYVKEFAVENSSSSGKPKRSIEASRDTAVVFVDLPSLVQSFLDVNQWKEMFPCLISKAATVDVICNGEGLSRNGAVQLMFAELQMLTPMVPTREVYFVRFCKQLSAEQWAIVDVSIDKVEDNIDASLVKCRKRPSGCIIEDKSNGHCKVIWVEHSECQKSAVHSMYRTIVNSGLAFGARHWIATLQLQCERLVFFMATNVPMKDSTGVATLAGRKSILKLAQRMTWSFCHAIGASSIHAWTKVTSKTGEDIRISSRKNLNDPGEPLGLILCAVCSVWLPVSPNVLFDFLRDENRRTEVPLSCLLSFLTLLSILVNNLNG

SEQ ID NO: 450 - DNA, 2214 bp, Glycine max
atgggtcaaatcggagaaagttttgatactagtaatttgctggggaggctgagggacgatgagtatgaaagccggtctggaagtgacaattttgatggcggatctggtgatgaccaggatgctggggatgatcagccacataaaaagaagaagaaataccacagacacacccctcaacaaattcaggagcttgaagcgtttttcaaggagtgtcctcatcctgatgagaagcaaagaactgatcttagcaagaggcttggcttggagaacaagcaagtcaagttctggtttcagaatcgacgaacccaaatgaagacacaactggaacgccatgagaacatgattcttaggcaggaaaacgacaagctccgagctgagaacagtgtaatgaaggatgctttggcaaatccgacatgtaacaactgtggtggcccagccattcctggtcaaatttccttggaggagcaccaaactagaatggaaaatgctcgactgaaggatgaactgaaccgaatatgtgcattggcaaacaagttcctgggccggccactctcgccactggccagtcctatggctctgccaccctcaaattctggtctagagcttgctattggaagaaatggaattggtggtccaagcaattttggcatgtccttgccaatgggatttgatgtgggagatggagttatgggctcctcacctgggatgtctagtatgggtgctagatcaccaatgggaatgatgggaaatgaaatccagcttgagagatctatgcttttagaccttgcattaaatgctatgaatgaattaattaagatggctcagccagatacctctctttggattaagagctctgatggcaggaatgaagtactcaaccatgatgagtatgcaagactgttttctccttatgttggatcaaaacctgctggttatgtgactgaagctacaagagggaccggagtagtaccagccagcagtttgggcattgttgaaacattgatggatgtggatcgatgggcggagatgttttcatctatgattgctagtgctgccactttggaagtactgtctagtggcatgggtgaaagcagaagtggagctttgcaagtgatgcttgctgaggttcaattgctttctccactagtccctgctcgttcattgagtttcctcaggtatagcaagcagcacggcgaaggtgtatgggctgtggttgatgtttcagttgacattggtcgtaatgttaccaattcacatccattaatgagctgcaggaggcttccctctggctgtgttattcaggatatgcccaatggtttctccaagattacttgggttgaacattcccaatatgacgagagtgttgtccaccaactttatcgcccattggttagttctggcattggctttggtgctcagagatggattgccaccctcttaaggcagtgtgactgcttggcaatcctcatgtctcaaatcccatctgaggaccccacagtcattagcctagagggtaagaaaaacatgctgaagctcgcacaacgcatgaccgagtacttctgctcagggatctgtgcttcgtctgtgcgcaagtgggaaatactgaacattggtaatctggctgatgacatgagaatcatggcccggaaaatcaatatggatgacccaactgaggctcctggcattgtgctgagtgcttcaacttctgtttggatgccggtgtcacggcaaagggtgtttgattttctgcgtgatgaaaatttgagaggcgagtgggacatgctgtccaaagatggaccaatgaaggagatgctccatattgctaaaggacaagatcgtggaaattgtgtttccatccttcattctgctaatagcgagtgcaatgtgctatatctgcaagaatcatggactgatgcttccggctcattggtagtgtattccccgatcaacatgcaagccttgaacatggtgatgaactgtggagattcatcatttgtcgctctccgcccatcaggctttgctattctgccagatggcgcttcaaacaacggtgatggcagtgatggtggtggcagctgcctgcttacagttgggttacaaatgttgccaaatggagaccaatcaaccaagttcacaatggagtcagttgttactgtcaatagcctcatctcaaacaccattcagaaggtcaaagatgcacttggagttgcgtga

SEQ ID NO: 451 - protein, 737 aa, Glycine max
MGQIGESFDTSNLLGRLRDDEYESRSGSDNFDGGSGDDQDAGDDQPHKKKKKYHRHTPQQIQELEAFFKECPHPDEKQRTDLSKRLGLENKQVKFWFQNRRTQMKTQLERHENMILRQENDKLRAENSVMKDALANPTCNNCGGPAIPGQISLEEHQTRMENARLKDELNRICALANKFLGRPLSPLASPMALPPSNSGLELAIGRNGIGGPSNFGMSLPMGFDVGDGVMGSSPGMSSMGARSPMGMMGNEIQLERSMLLDLALNAMNELIKMAQPDTSLWIKSSDGRNEVLNHDEYARLFSPYVGSKPAGYVTEATRGTGVVPASSLGIVETLMDVDRWAEMFSSMIASAATLEVLSSGMGESRSGALQVMLAEVQLLSPLVPARSLSFLRYSKQHGEGVWAVVDVSVDIGRNVTNSHPLMSCRRLPSGCVIQDMPNGFSKITWVEHSQYDESVVHQLYRPLVSSGIGFGAQRWIATLLRQCDCLAILMSQIPSEDPTVISLEGKKNMLKLAQRMTEYFCSGICASSVRKWEILNIGNLADDMRIMARKINMDDPTEAPGIVLSASTSVWMPVSRQRVFDFLRDENLRGEWDMLSKDGPMKEMLHIAKGQDRGNCVSILHSANSECNVLYLQESWTDASGSLVVYSPINMQALNMVMNCGDSSFVALRPSGFAILPDGASNNGDGSDGGGSCLLTVGLQMLPNGDQSTKFTMESVVTVNSLISNTIQKVKDALGVA

SEQ ID NO: 452 - DNA, 2223 bp, Glycine max
atgtataacaaaagtcagaacacaaaattcgattctcaacaacaacagcagcagcaacaaccgcagcagcaacaaccgcagaatttgatggagatgtcaacacagaggacatcctcggaaggaaggaaccgagacgatcaggaacctgctgcgggaaacgaagtcaccatggaagctcctccttcgggtgacgaggaccaagatcccgatgaggggttcaaaaggaggcgccacacccgccacacactgcaccaaatttcagagatggaagctttcttcaaggagtgccctcaccctgatgagaagcaaaggaaagcgcttggccgcgagctcgggttggtgcctttgcaaatcaagttttggtttcaaaacaagcgcactcaagtgaagtctcaacaagagagatacgaaaacaaccttctgagggttgagaatgacaagcttcgagcagagaacagtaggtacaggaatgcactatcgaatacttcatgccctaactgtggagcccctactactcttggagaaatgtcctttgacgagcagcagttgaggatggagaatgcgcgacaaaaagaggagattgatagcatgtcaggacttgcagccaagtatgcagctggaaaatctgcgagcaattcgtactataacatgccatctaatcaaaaccagatgccttcgcgctcgcttgacctgggagttcagcatcaacaacagcaacaacaagaacaacaacaacaacaactatattgtacaagcgcaacctatttaatttcggagattggtctcgtggcagtagaggaaatcaatcagttgactctgtctgcagatcctttgtgggtcccaggcaattacggaagtgaagttataaatgaagatgaatacctgaggcatttccctaggggaataggtccaacactcttgggcgcaagaaccgaatcatctcggcaaaccgctatagtaatgatgcatcatatgaaactcgttgagatgcttatggatgtgaatcaatggtcaaatatgttttgcggcatcgtttcaagggcagtgacacacgaagtgctgtcaattggagaccatgcaagatacgatggagcctaccaagtgatgtcagctgagtttcaggttccttcaccccttgttcctactcgcgacaactatttcatcaggttcagtaagaagcacgcaggacaatcatgggcggtggttgatatttcaatggatcatctgcgacctggtgcagtcacaagaacccgaagacgaccctctggttgcataattcaagaattgccaaatggttactcaaaggtcatatgggttgaacatgtcgaagttgacgacatcgaggtgcataatctttacaaaaatttggttaactctacccttgcgtttggagctaaacgttggattgcagcaatagaaagaacatgcgaacatcttgctagggcaatggccaccaacataccccaaggggcactttgtgtgataacaagtcacgagggtcggaaaagtatgatgaagctggccgaaagaatggtattgagcttttctactggtgtgggtgcttccactgcaaacgcttggacaccactaccacttgatcttgaaaatgttagggtcatgaccagaaagagcgtggatgatccaggcagaccttccggtatagtgctcagtgctgcaacttctctctggctcccagttcctgcaaggagagtttttgactttctcagatccgaaaacactagaaatcagtgggatattctgtcgagcggggctcaagtgaacgagcttgcacatattgctaaagggagagaccatggaaattctgtctctcttcttcgagtgaatactcagaatgtggcccagaacaatatgctgatacttcaagagagttgcattgatgctacaggctcatttgtggtttatgctcctattgatttagcttccatgaatcttgtgttgggtggtggtaatccggattacgtggccctgctcccttcgggctttgctgttcttcctgatgggcctgcattgaacgtagtgcccgggcccgtatgtgaggttgttggatctggacgaggttgtcttcttacggttgcatttcagatactggtggattctacaccaacggcaaaactctctgttggttcagtgacaaccgttaacaatttgataaagagaaccgtggaaaggatcaaagattcagtcacgcttgacggcgcctaa

SEQ ID NO: 453 - protein, 740 aa, Glycine max
MYNKSQNTKFDSQQQQQQQQPQQQQPQNLMEMSTQRTSSEGRNRDDQEPAAGNEVTMEAPPSGDEDQDPDEGFKRRRHTRHTLHQISEMEAFFKECPHPDEKQRKALGRELGLVPLQIKFWFQNKRTQVKSQQERYENNLLRVENDKLRAENSRYRNALSNTSCPNCGAPTTLGEMSFDEQQLRMENARQKEEIDSMSGLAAKYAAGKSASNSYYNMPSNQNQMPSRSLDLGVQHQQQQQQEQQQQQLYCTSATYLISEIGLVAVEEINQLTLSADPLWVPGNYGSEVINEDEYLRHFPRGIGPTLLGARTESSRQTAIVMMHHMKLVEMLMDVNQWSNMFCGIVSRAVTHEVLSIGDHARYDGAYQVMSAEFQVPSPLVPTRDNYFIRFSKKHAGQSWAVVDISMDHLRPGAVTRTRRRPSGCIIQELPNGYSKVIWVEHVEVDDIEVHNLYKNLVNSTLAFGAKRWIAAIERTCEHLARAMATNIPQGALCVITSHEGRKSMMKLAERMVLSFSTGVGASTANAWTPLPLDLENVRVMTRKSVDDPGRPSGIVLSAATSLWLPVPARRVFDFLRSENTRNQWDILSSGAQVNELAHIAKGRDHGNSVSLLRVNTQNVAQNNMLILQESCIDATGSFVVYAPIDLASMNLVLGGGNPDYVALLPSGFAVLPDGPALNVVPGPVCEVVGSGRGCLLTVAFQILVDSTPTAKLSVGSVTTVNNLIKRTVERIKDSVTLDGA

SEQ ID NO: 454 - DNA, 2289 bp, Glycine max
atgggcgccgacatgtccaacaataataatcctcctcccacttctcacgccaaagacttgtttgcttctccagctctctctctcagcctcgctggcatttttcgccatgctggggtggccgcggctgatgaggctgccacttctgtggaggagggcgaagaagggagtggaggagctgctgagaggttagaggagattagcagcgagaactccggccccacgagatccagatcagaggatgacttcgaaggaggagaagctgaacctgaagatgatgacgatgcccatggagacaacaagaacaagaagacgaagaagaagaggaagaaatatcacaggcacactgctgaccagatcagagaaatggaagcgcttttcaaagagtcaccacatcctgatgaaaagcagaggcaacaactaagcaagcaattaggccttgccccaaggcaagtcaagttttggttccaaaatcgtcgaacccaaatcaaggcaatacaagagcgtcatgaaaattctttgttgaagtcagaaatagagaaactaaaggagaaaaataagagcttacgagagaccataaacaaagcttgttgccccaactgtggcgtgcccaccacaagcagagatggtgtcatgccaactgaagaacaacaactacgtattgaaaatgccaaactcaaagctgaggtagagaaactccgagcagctttagggaaatacgcaccagggtcaacgtccccttcatgttcttctggccatgaccaagagaatagaagctctttggatttttacactggaatttttggacttgataagtcaaggataatggacatagtaaaccaagcaatggaggagctcattaagatggctaccgtgggggaaccattatggcttcgtagcttcgagactggtcgcgaaattcttaactatgatgaatatgttaaggagtttgcagttgaaaattcaagcagtagtggaaagccaaagagatccattgaagcctcaagagacactgcagttgtttttgtggatctccctagtcttgtccaaagttttctagacgtgaatcagtggaaggaaatgtttccgtgtttgatatctaaggcggcaactgttgatgttatatgcaatggagagggtcttagcaggaatggtgcagtgcaactgatgtttgctgagcttcaaatgctgactcctatggttcccacaagagaagtctattttgttcgtttctgcaagcagttgagtgctgaacagtgggcaatcgttgatgtatccatagacaaagtagaagacaacattgacgcgtccctcgtgaaatgcagaaaacgcccttctggttgcattattgaggacaagtccaatggccattgcaaagtaatatgggtggagcactcggaatgccagaagagtgcagtccattcaatgtatcgcaccattgtgaacagtggcctagcttttggggccaggcattggattgcgactcttcaacttcaatgtgaacgtctagttttcttcatggcaacaaatgttcccatgaaggattcaaccggtgttgccaccttggccgggagaaaaagcattctgaagttggcacaaagaatgacatggagtttctgccatgcaattggcgcgtcaagcatccacgcatggactaaggttacaagtaaaactggagaagacataaggataagttctagaaagaacttgaacgatcctggtgaacctcttgggttgatattgtgcgctgtttgttctgtatggttgcctgtctcacctaatgttctgtttgatttcttgagggatgaaaatcgccgaactgaatgggacatcatgtcaagtggtgggacagtgcagtctattgcaaatttagccaaaggacaagaccgaggcaatgccgtagccattcaaacaattaaattgaaagaaaacagtgtgtggatactgcaagatagctgcacaaacctttatgagtcaatggtggcatatgcttgtgtggacattactggcattcagtctgtgatgacaggatgtgattctagcaatcttgccatactgccctcaggattctccattattcctgatggtcttgagtcaaggccattggtgattagttcaaggcaggaagaaaaaaatactgagggaggatctttgtttacaatggcattccagattcttaccaatgcttctcccacagccaagttaacattggaatctgtggactcggtcaacactcttgtatcttgtacattgagaaatatcagaacaagtttacaatgtgaagatggttag

SEQ ID NO: 455 - protein, 762 aa, Glycine max
MGADMSNNNNPPPTSHAKDLFASPALSLSLAGIFRHAGVAAADEAATSVEEGEEGSGGAAERLEEISSENSGPTRSRSEDDFEGGEAEPEDDDDAHGDNKNKKTKKKRKKYHRHTADQIREMEALFKESPHPDEKQRQQLSKQLGLAPRQVKFWFQNRRTQIKAIQERHENSLLKSEIEKLKEKNKSLRETINKACCPNCGVPTTSRDGVMPTEEQQLRIENAKLKAEVEKLRAALGKYAPGSTSPSCSSGHDQENRSSLDFYTGIFGLDKSRIMDIVNQAMEELIKMATVGEPLWLRSFETGREILNYDEYVKEFAVENSSSSGKPKRSIEASRDTAVVFVDLPSLVQSFLDVNQWKEMFPCLISKAATVDVICNGEGLSRNGAVQLMFAELQMLTPMVPTREVYFVRFCKQLSAEQWAIVDVSIDKVEDNIDASLVKCRKRPSGCIIEDKSNGHCKVIWVEHSECQKSAVHSMYRTIVNSGLAFGARHWIATLQLQCERLVFFMATNVPMKDSTGVATLAGRKSILKLAQRMTWSFCHAIGASSIHAWTKVTSKTGEDIRISSRKNLNDPGEPLGLILCAVCSVWLPVSPNVLFDFLRDENRRTEWDIMSSGGTVQSIANLAKGQDRGNAVAIQTIKLKENSVWILQDSCTNLYESMVAYACVDITGIQSVMTGCDSSNLAILPSGFSIIPDGLESRPLVISSRQEEKNTEGGSLFTMAFQILTNASPTAKLTLESVDSVNTLVSCTLRNIRTSLQCEDG

SEQ ID NO: 456 - DNA, 2322 bp, Glycine max
atgagttttggggggtttcttgagaccaaacaaagtgatggaggtggtggtaggattgtagtttcagatattccttacaacagcaacaacggttcaaaccacagcaacgatataatgccctctggtgcaatctcgctgcctcgtttagccactcctactttggccaaatccatgctttttgttttggttggttctatttgcttacttttttttttgaatggtttgagaaggagccgggaagaggagcatgaaagcagatctggcagtgacaacatggatggtggttctggtgatgattttgatgctgccgacaacccaccgaggaaaaaacgctatcaccgacacactcctcagcaaattcaagagcttgaatcgctcttcaaggagtgtcctcacccggatgagaagcaaaggcttgaactcagcagaaggcttaatttggaaacgaggcaagtaaagttttggttccaaaatcgaagaacacaaatgaagacacaattggaacggcacgagaactcgctgctaaggcaagagaatgacaagcttagagctgaaaacatgtctatgagggaagccatgagaaatcccatatgctcaaactgtggaggtcctgctatgatcggtgaaatttcactcgaagaacagcacctcagaattgagaatgctagattgaaagatgaactagaccgtgtttgtgcactcgctggcaagtttctgggtcgacccgtttcttctctaacaagctcaattgggcctccaatgccaaactcaagtttggagcttggtgttgggagcaatggttttggacaagcattggtgactccttctggctttgacaacagatcaattgagaggtctattgttcttgaacttgctttggctgcaatggatgagttggtgaagatggcacaaactggtgagcctctttggatcagaagcttggaagggggaagagaaattctcaaccatgaggagtacacaaggactatcactccttgcattggcttgagacccaatggctttgtcactgaggcttctagacaaactggaatggtcatcataaacagcttggcccttgttgaaacattaatggactcaaatcgttggtcagagatgttcccttgtatgattgctagaacctcaaccgctgaagttatatctaatggaataaatggaactagaaatggtgcccttcagctaatgcatgctgagcttcaagttctttctcccttggttcctgttcgtgaggtcaattttctacgcttttgcaagcagcacgcagaggggttatgggcagtggtagatgtgtccatagataccatccgagaaacttctggagcacccacttttgtgaactgtaggaggcttccttctggttgcgtggtgcaagatatgccaaatggttactctaaggtgacatgggtggaacatgcagaatacgacgaaagccaaattcaccagctctttagacccttgttgagctcaggcatggggtttggtgcacaacgttgggttaccactcttcaacgccaatgcgagtgcctagccattctaatgtcctcagcagctccctctagagaacattcagcaataagctcaggtggaaggagaagcatgttgaagctggcacatcgcatgacgaacaatttctgttcgggtgtgtgtgcctccacagtgcacaagtggaacaagctgaacgcaggaaacgtgggggaggacgtgagggtgatgaccaggaagagtgtggacgacccgggcgagccgcccgggatcgtcctaagcgctgccacctcagtgtggcttcccgtctcgtcgcagaggctctttgacttcctccgcgacgagcggctccgaagcgagtgggatatcctctccaacggtggacccatgcaagagatggctcacattgcaaagggacaagaccatgctaactgtgtctccctccttagagccagtgctataaatgcgaaccagagcagcatgttgattttgcaggagacgtgcaccgacgcgtcgggctcgcttgtggtgtacgcgccggtggacattccggcgatgcacgtcgtgatgaacggcggcgactctgcttacgtggcgcttctcccgtcagggttcgccatcgtgcccgacgggtccggcgaggagcaaggtggcgcgtcgcagcagagggcggcgagtgggtgtcttctcacggtggcgtttcagatccttgtgaacagccttccgacggcgaagctcacggtggagtcggtggagacggtgaacaacctcatctcctgcaccgtgcagaagataaaatcagctcttcattgcgagagctga

SEQ ID NO: 457 - protein, 773 aa, Glycine max
MSFGGFLETKQSDGGGGRIVVSDIPYNSNNGSNHSNDIMPSGAISLPRLATPTLAKSMLFVLVGSICLLFFLNGLRRSREEEHESRSGSDNMDGGSGDDFDAADNPPRKKRYHRHTPQQIQELESLFKECPHPDEKQRLELSRRLNLETRQVKFWFQNRRTQMKTQLERHENSLLRQENDKLRAENMSMREAMRNPICSNCGGPAMIGEISLEEQHLRIENARLKDELDRVCALAGKFLGRPVSSLTSSIGPPMPNSSLELGVGSNGFGQALVTPSGFDNRSIERSIVLELALAAMDELVKMAQTGEPLWIRSLEGGREILNHEEYTRTITPCIGLRPNGFVTEASRQTGMVIINSLALVETLMDSNRWSEMFPCMIARTSTAEVISNGINGTRNGALQLMHAELQVLSPLVPVREVNFLRFCKQHAEGLWAVVDVSIDTIRETSGAPTFVNCRRLPSGCVVQDMPNGYSKVTWVEHAEYDESQIHQLFRPLLSSGMGFGAQRWVTTLQRQCECLAILMSSAAPSREHSAISSGGRRSMLKLAHRMTNNFCSGVCASTVHKWNKLNAGNVGEDVRVMTRKSVDDPGEPPGIVLSAATSVWLPVSSQRLFDFLRDERLRSEWDILSNGGPMQEMAHIAKGQDHANCVSLLRASAINANQSSMLILQETCTDASGSLVVYAPVDIPAMHVVMNGGDSAYVALLPSGFAIVPDGSGEEQGGASQQRAASGCLLTVAFQILVNSLPTAKLTVESVETVNNLISCTVQKIKSALHCES

SEQ ID NO: 458 - DNA, 2412 bp, Glycine max
atgagttttgggggtcttttagacaacaaatcaggtagtggcggtgccagaaacaacgtttcagatattccttacaacaacaacaacgttaccaataccaccaccaccaacaacgatagaatgccctttggtgcaatctctcagccacgcctcgtgaccaccactcccactttggccaaatccataattgatgatggacaagaagatgtgaatagaatggccgagaatacctccgaaccgaacggtttgagaagaagccgagaagatgaacatgaaagcagatctggcagtgacaacatggacggcgcttccggcgacgaacacgacgccgccgacaaccctccgaggaaaaaacgctatcaccgacacacccctcagcagatacaagaacttgaagcgttgttcaaggagtgtcctcatccagatgaaaagcaaaggcttgaactgagtagaaggctgtgtttggaaactcgtcaaacccagttggagcgacacgagaatacgttgctgaggcaagagaacgacaagcttcgagcggagaacatgtccataagggacgcaatgaggaaccccatgtgctccaattgcggtggcccagccatcatcggcgagatttctctggaagagcagcacctccgcatcgagaacgcgcgcctcaaggatgaactcgaccgcgtgtgtgtactcgcgggcaagttcttggggcgccccgtttcctcattaccgagttccagtttggagctcggcatgagaggaaacgggttcgcaggaatacctgcggcaacaacgttgccgctgggacaggattttgacatgggtatgtctgtgtcaatgaataataatgcgttggctatggtgtctccaccgacgagtgctagggcggccgcggccggattcgataggtcggtggagaggtcgatgtttcttgagcttgccttggctgctatggatgagttggtgaagatagcgcagactggggagcctctttggatgaggaatgttgaaggagggagggaaattttgaacaatgaggagtacgtgaggaccttcactccttgcattggtttaagacccaatgggtttgtgtctgaggcctctagggaaaatggaatggtcatcattaacagcttggcacttgttgagactcttatggactcgaatcgatgggcagagatgtttccttgtatcattgcaagaacctccaccacggaagtgatatctagtggaataaacggaacaagaaatggggcacttcaattaatgcatgctgaacttcaagttctttcccctttggtgccggttcgtgaggtgaatttcctgcggttttgcaagcaacacgcagaaggggtgtgggctgtggtggatgtgtccatagatagcatccgagaaagttcgggagcacccacttttgtgaactgtaggaggcttccttctggttgcgtggtgcaagatatgcccaatggttactccaaggtgacatgggtggagcatgcagaatacgatgaaagtcaagttcaccagctctatagacctttgttgagctcaggcatggggtttggtgcccaacgttgggtcgctacccttcaacgccaatgcgagtgccttgccattctaatgtcctcagcagcaccctctcgagatcattccgcaataacagcagggggaaggcggagcatgatgaagctggcgcagcggatgacgaacaacttctgcgcgggggtgtgcgcgtcaacggtgcacaagtggaacaagctcaacgccggcaacgtcgacgaggacgtcagggtcatgactcgcaagagcgtcgacgatcccggggagccaccggggatcgtcctcagcgccgccacctccgtctggctacccgtctccccccaccgcctcttcgatttcctccgcgacgagcgcctccgcagcgagtgggacatcctctccaacggtggccccatgcaggagatggcccacatcgccaagggccaagaccacggcaacgcagtctctctccttagagccagtgcgataaattccaaccagagtagcatgctgatactgcaggagacatgcatagacgcggcggggtcgcttgtggtgtacgcgccggtggatatcccagcaatgcacgttgtaatgaacggtggcgattctgcttacgtggcgttgttaccttcagggttcgctatcgtccccgatgggcccgggtctcgtgggccaccgaacgggcccacttccacaacaaacggcggcgataacggcgtgacgcgcgtgagtgggtcccttctgacggtggcgtttcagatccttgtgaatagtctccctacggcgaagctcacggtagagtcggtggaaaccgtgaacaacctcatctcgtgcacggttcagaagatcaaagccgcgctccactgcgaaagttaa

SEQ ID NO: 459 - protein, 803 aa, Glycine max
MSFGGLLDNKSGSGGARNNVSDIPYNNNNVTNTTTTNNDRMPFGAISQPRLVTTTPTLAKSIIDDGQEDVNRMAENTSEPNGLRRSREDEHESRSGSDNMDGASGDEHDAADNPPRKKRYHRHTPQQIQELEALFKECPHPDEKQRLELSRRLCLETRQTQLERHENTLLRQENDKLRAENMSIRDAMRNPMCSNCGGPAIIGEISLEEQHLRIENARLKDELDRVCVLAGKFLGRPVSSLPSSSLELGMRGNGFAGIPAATTLPLGQDFDMGMSVSMNNNALAMVSPPTSARAAAAGFDRSVERSMFLELALAAMDELVKIAQTGEPLWMRNVEGGREILNNEEYVRTFTPCIGLRPNGFVSEASRENGMVIINSLALVETLMDSNRWAEMFPCIIARTSTTEVISSGINGTRNGALQLMHAELQVLSPLVPVREVNFLRFCKQHAEGVWAVVDVSIDSIRESSGAPTFVNCRRLPSGCVVQDMPNGYSKVTWVEHAEYDESQVHQLYRPLLSSGMGFGAQRWVATLQRQCECLAILMSSAAPSRDHSAITAGGRRSMMKLAQRMTNNFCAGVCASTVHKWNKLNAGNVDEDVRVMTRKSVDDPGEPPGIVLSAATSVWLPVSPHRLFDFLRDERLRSEWDILSNGGPMQEMAHIAKGQDHGNAVSLLRASAINSNQSSMLILQETCIDAAGSLVVYAPVDIPAMHVVMNGGDSAYVALLPSGFAIVPDGPGSRGPPNGPTSTTNGGDNGVTRVSGSLLTVAFQILVNSLPTAKLTVESVETVNNLISCTVQKIKAALHCES

SEQ ID NO: 460 - DNA, 2244 bp, Glycine max
atgtcaagtatgggagggaacgtagtagtaaacccagacaccctcttctcttcctcgatccagaactctagcttcaacttcatccccaccatgccctttcaaccttttccttccatgaaagaagaagatgggatcttgcgagggaaggaagaggttgagagtggatcagggagtgaacaattagttgaagacaagtcagggaatgaacaagagagtcatgaacaacccacaaagaagaaacgttatcacaggcacactgctcgccagatccaagaaatggaagctttgttcaaggaatgtccacacccggatgataagcagagactgaaactgagccatgaattgggtcttaaaccgcgccaggtcaagttctggttccagaaccgtcgaacccagatgaaggcacaacaagaccgtgcagataatgtgatacttagagctgagaatgagtctcttaagagtgagaattatcggttacaagctgcactgcgtaacgtaatttgtcccaactgtggtggcccatgcataatgggtgctgatatgggcttggatgaacaccaagttcgcattgaaaatgcccgtttaagagaagagttagaacgcgtgtgttgtctcacaacaagatacactgggcgtccaatacaaacaatggcaacaggtcctactctaatggccccttcattggatttggacatgagcatatacccaaggcactttgcggataccattgctccttgcactgaaatgattcctgtgccaatgttgcctcccgaagcttcacctttttctgagggtggtatcctaatggaagaagagaagtctctgaccttggagcttgccgcttcctccatggctgaacttgtgaagatgtgtcagacaaacgagccactttggattcgaagcactgagagtgaaagggaagtgctcaattttgaagagcatgcaaggatgtttgcttggcctcagaatctcaagcatcgaagtgagctaaggactgaagctagccgtgacacttctgtggttataatgaatagtgtaactcttgttgatgctttccttgatgctcaaaaatggatggaattgtttcctacaatcgtttcaagagcaaaaactgtccaaatcatatcttctggtgcttccggtcttgcaagcgggactcttcagctgatgtacgcagaattccaagttctttctcctttggtgtccactcgtgagactcattttcttcggtattgtcaacaaaatgctgaggagggaacctgggccattgttgattttcctgttgatagctttcaccaaaattttcacccttcttatcctagatactgcaggaggtcctctggctgcgtgattcaagatatgccaaatgggtattcaagggtaacatgggttgagcatgcaaaagtagaagagaagcctgtgcatcagatattctgcaactatgtgtacagtggaatggcatttggagcacagcgttggttaggagttttgcagagacaatgtgagagggtcgcaagcctcatggccagaaacatatcagatcttggagcgataccttcgccagaagcgcgaaagaacttgatgaagctagctcaaagaatgataaaaacgtttagccttaacatgagtacctctggtggtcaatcatggacagccatatcagattcccctgaagacactgttagaatcacaactaggaaaatcacagagcctggacaacctaatggcgtgattctaagtgcagtttcaactacttggttgccctattctcacaccaaggtctttgatctcctcagggatgaacgccgcagatctcagatggatgctctttccaatgggaactcattgaatgaagtggctcatattgcaaatggctcacatccaggaaactgcatttctcttcttcgcataaatgtagcgagcaactcatcccagaacgtagagctaatgctgcaagagaattgcaccgaccaatctggaagcatagtagtgtacacaaccatcgacgtggattcgatccagctagccatgagtggtgaggacccttcttgcattgcacttcttccccaaggcttcaagatagtgccaatagcctcctccatctctcaacaacaacaactcaggtggttgcctcctgacaatggggctgcaggttctcgcgagcacgatcccttctgcaaagctcaacctctcgagcgtcaccgctatcaacaatcacctttgcaacaccttgcaccagattga

SEQ ID NO: 461 - protein, 747 aa, Glycine max
MSSMGGNVVVNPDTLFSSSIQNSSFNFIPTMPFQPFPSMKEEDGILRGKEEVESGSGSEQLVEDKSGNEQESHEQPTKKKRYHRHTARQIQEMEALFKECPHPDDKQRLKLSHELGLKPRQVKFWFQNRRTQMKAQQDRADNVILRAENESLKSENYRLQAALRNVICPNCGGPCIMGADMGLDEHQVRIENARLREELERVCCLTTRYTGRPIQTMATGPTLMAPSLDLDMSIYPRHFADTIAPCTEMIPVPMLPPEASPFSEGGILMEEEKSLTLELAASSMAELVKMCQTNEPLWIRSTESEREVLNFEEHARMFAWPQNLKHRSELRTEASRDTSVVIMNSVTLVDAFLDAQKWMELFPTIVSRAKTVQIISSGASGLASGTLQLMYAEFQVLSPLVSTRETHFLRYCQQNAEEGTWAIVDFPVDSFHQNFHPSYPRYCRRSSGCVIQDMPNGYSRVTWVEHAKVEEKPVHQIFCNYVYSGMAFGAQRWLGVLQRQCERVASLMARNISDLGAIPSPEARKNLMKLAQRMIKTFSLNMSTSGGQSWTAISDSPEDTVRITTRKITEPGQPNGVILSAVSTTWLPYSHTKVFDLLRDERRRSQMDALSNGNSLNEVAHIANGSHPGNCISLLRINVASNSSQNVELMLQENCTDQSGSIVVYTTIDVDSIQLAMSGEDPSCIALLPQGFKIVPIASSISQQQQLRWLPPDNGAAGSREHDPFCKAQPLERHRYQQSPLQHLAPD

SEQ ID NO: 462 - DNA, 2391 bp, Hordeum vulgare
atgcccggtgggatgatgatcccaggacgcaacatgatcggccggagtaacggcgccggcgtcgcctacgcctcctcctcctcctccgcgctctccctcggccagaacttgatggatgggatgcaccaccaccagctcccagcaatgctgcagcaccagatggttgatcaccatcttcttcttccccagcatcatcaccatcctcaccagcaggcagccacgagcgacagcgatgcccggggcccccacggagggggcaacaacaacagtagcaacaacaatgaagagctcgagatgagcaagtcgggtaccggcagcgataacaacctcgacggcgaaggcggtgggggcggcggggaggacgacgagcaagaggacccggccgggcagcatcccaggaagaagaagcgttaccaccgtcacacccagcaccagatccaggagcttgaggccttcttcaaggagtgcccccaccccgacgacaagcagcgcaaggagcttagccgccagctctccctcgagcccctccaggtcaagttctggttccagaacaagcgcacccagatcaagacgcagcacgagaggcaggagaacacggcactcaggacggagaacgacaagctgagggcagagaacatgaggtacaaggaagcgctggccaacgcgtcgtgcccaaactgcggcgggcccgcggccatcggggagatgtccttcgatgagcaccatctgcgcatagagaacgcgcgcctccgcgacgagattgacaggatctccgccatcgccgccaagtacgtaggtggcaagcctggctccggggtggctgtggcctccgccgcctacccgccactgccaccgcagtcttccggccgctctgcgctcgaccacctaggcatgcccggcatgtttggcggtgctgagttcgataagccgatggtgatcgagctggccgtggcggccatggaggagctggtccgaatggcgcagctcggggagcctctctgggtgccatccctcgacagtgaggcgctcagcgaggaggagtatgctcgcgccttcccacggggtgcactcggccccaagtcgccggagctccggtccgaggcgtcgagggagacagacgttgtcatcatgaaccacgtcagcctcgttgagatgctcatggacgtgcgtcagtggtcggcgctcttctcgagcatcgtgtcccgggcggccacgcttgacgttctgtccaccggcgtcgccggcaatcacgacggcgccctgcagctcatgtcggctgaatttcagatgccgtcgcccctggtgccaacgcgagacacccagttcctgcgctactgcaagcagcatcctggcggtgcatgggccgtcgtcgacgtctccctcgacggtctccgttccgctgcacgggtgggcgggcactttcgccgccgcgcctccggctgcctcatccaggagatgccgaacggctactctaaggtgacgtgggtggagcacgtcgaggcaggtgacgatgcaatgatgcacgatctgtacagacccctggtgaactctgggctggcattcggcgcgcggcggtggacgtcgacattgaagcgtcagtgcgagcgtctggcgagcgccatggcaactgtgccctcctcaggcggtgacgtgattacgacggcggagggacgaaggagcatgctgaagctggcggagaggatgacggcgagcttctgtggcggggtgactgcgtcgacgacacaccagtggacgacgctctctggtagcggggcggaggacgtgcgtgtgatgacccgcaagagcgtcgacgaccccggccgcccaccgggtatcatcctcaacgctgccacctccttctggctccccgtccctccctcccgcgtcttcggcttcctgcgcgacgattccacccgcagcgaatgggacatcctctccaacggcggcgtcgtccaggagatggcccacatcgccaacggcagccaccacggcaacgctgtctccctcctccgcgtcaacaacgcgaactcgaaccagagcaacatgctgatcctgcaggaatgctgcacggacgcgacggggtcgtatgtggtgtacgcgccggtggacgtggtggccatgaacgtggtgctcaacggcggggacccggactacgtggcgctgctgccgtccgggttcgccatccttcctgacgggccggccgggtccccggatgctggcgggtcgctcctcaccgtcgccttccagatcctcgtcgactccgtgcctacagccaagctctcgctgggatccgtcgccaccgtcaacagtctcatcgcatgcaccgtcgaccgcatcaaggctgcagttgtcgtcagcgccggtgacaacgctggcgtcgccgcccggtga

SEQ ID NO: 463 - protein, 796 aa, Hordeum vulgare
MPGGMMIPGRNMIGRSNGAGVAYASSSSSALSLGQNLMDGMHHHQLPAMLQHQMVDHHLLLPQHHHHPHQQAATSDSDARGPHGGGNNNSSNNNEELEMSKSGTGSDNNLDGEGGGGGGEDDEQEDPAGQHPRKKKRYHRHTQHQIQELEAFFKECPHPDDKQRKELSRQLSLEPLQVKFWFQNKRTQIKTQHERQENTALRTENDKLRAENMRYKEALANASCPNCGGPAAIGEMSFDEHHLRIENARLRDEIDRISAIAAKYVGGKPGSGVAVASAAYPPLPPQSSGRSALDHLGMPGMFGGAEFDKPMVIELAVAAMEELVRMAQLGEPLWVPSLDSEALSEEEYARAFPRGALGPKSPELRSEASRETDVVIMNHVSLVEMLMDVRQWSALFSSIVSRAATLDVLSTGVAGNHDGALQLMSAEFQMPSPLVPTRDTQFLRYCKQHPGGAWAVVDVSLDGLRSAARVGGHFRRRASGCLIQEMPNGYSKVTWVEHVEAGDDAMMHDLYRPLVNSGLAFGARRWTSTLKRQCERLASAMATVPSSGGDVITTAEGRRSMLKLAERMTASFCGGVTASTTHQWTTLSGSGAEDVRVMTRKSVDDPGRPPGIILNAATSFWLPVPPSRVFGFLRDDSTRSEWDILSNGGVVQEMAHIANGSHHGNAVSLLRVNNANSNQSNMLILQECCTDATGSYVVYAPVDVVAMNVVLNGGDPDYVALLPSGFAILPDGPAGSPDAGGSLLTVAFQILVDSVPTAKLSLGSVATVNSLIACTVDRIKAAVVVSAGDNAGVAAR

SEQ ID NO: 464 - DNA, 1881 bp, Medicago truncatula
atgaagttggtgttttgtttgcagacacaacatgaacgttcggagaattctcagttaagagcagataatgaaaagcttagagctgataacatgaggtatagagaagctcttagcaatgcttcatgtcctaattgtggtggtccaacagctataggtgaaatgtcatttgatgaacatcatttgaggcttgaaaatgcaaggctaagagaagagattgatagaatttcaacaatggcagcgaagtacgttgggaagccagtggtgaactactcaaacatttcaccatctctcccaccacgtacggaaattggtttcggcaacccacaagggattggtactatggacatgtatggagccagtggagatattctaaggtcaattagtgggccgaccgaagctgacaaaccaattataatagaattagctgttgcagctatggaagagcttattgggatggctcaaatgggtgatcctctttggctaagaactacacctgaaggagctgctaccgtgcttaatgaagatgaatatgttaggtcgtttcctcgtgggattggacctaaacctaatggtttcaaatgtgaagcttcgagggaatctagcgttgttatcatgaatcatgtcaaccttgttgagattctcatggatgtgaaccaatggtcaacagtgtttgctggaattgtttcaagagctgtgactgtggaggtgttgtcaactggagtggcaggaaactacaatggtgctttacaagtgatgacagcagagtttcaagtaccttcaccccttgtgccgactcgtgagagttactttgtaaggtattgtaaacaacatcctgacgggacatgggcagttgtggatgtgtctttggataatctgcgcccgagtccttcatctagatgtagaagaaggccttctggttgcttaattcaagagatgccaaatggttactcaaaggtgacatgggttgagcatgtagaagtggatgagaggggtgttcataatctatacaagcaacttgttaacactggagatgcatttggtgcaaaacgttgggttgcgactttagatcgacaatgtgaaagacttgctagctccatggcaacaaacattcccaccgttgatgttggggtgataacaaaccaagaagggaggaagagtatgttgaaactggcagagagaatggtgataagtttctgtggtggagtgagtgcttcaacagcacacacatggacaacactgtctggaacaggagccgatgatgtgagagtgatgactcgtaagagtgtcgatgatcctggaagacctcctggtattgttcttagtgctgctacttctttttggcttcctgttccaccaacacaagtttttgaatttcttcgtaacgagaactccagaactgagtgggatattctttctaatggtggagttgtccaagaaatggcgcacattgcaaatggacgagatactggaaattgtgtgtctctccttagagtaaatagtccaaattcgagccagagcaacatgttaatactacaagagagtgtaacagatgcaacaggctcatttgttatctatgcgccagtagatatggttgctatgaatgtagttctaaatggaggagatccagattatgttgcacttcttccatcaggatttgctatcctctctgatggaaatggaaatggagtcggcggtgaaactggaggaggagtaggagctggtgctggtggtggtggatcccttctgaccgtcgcttttcaaatcttggttgattctactccaactgctaaactctctcttggatcagttgctactgttaatagtcttatcgcttgtactgttgagagaatcaaagcttctttatctggtgaaagtgcttag

SEQ ID NO: 465 - protein, 626 aa, Medicago truncatula
MKLVFCLQTQHERSENSQLRADNEKLRADNMRYREALSNASCPNCGGPTAIGEMSFDEHHLRLENARLREEIDRISTMAAKYVGKPVVNYSNISPSLPPRTEIGFGNPQGIGTMDMYGASGDILRSISGPTEADKPIIIELAVAAMEELIGMAQMGDPLWLRTTPEGAATVLNEDEYVRSFPRGIGPKPNGFKCEASRESSVVIMNHVNLVEILMDVNQWSTVFAGIVSRAVTVEVLSTGVAGNYNGALQVMTAEFQVPSPLVPTRESYFVRYCKQHPDGTWAVVDVSLDNLRPSPSSRCRRRPSGCLIQEMPNGYSKVTWVEHVEVDERGVHNLYKQLVNTGDAFGAKRWVATLDRQCERLASSMATNIPTVDVGVITNQEGRKSMLKLAERMVISFCGGVSASTAHTWTTLSGTGADDVRVMTRKSVDDPGRPPGIVLSAATSFWLPVPPTQVFEFLRNENSRTEWDILSNGGVVQEMAHIANGRDTGNCVSLLRVNSPNSSQSNMLILQESVTDATGSFVIYAPVDMVAMNVVLNGGDPDYVALLPSGFAILSDGNGNGVGGETGGGVGAGAGGGGSLLTVAFQILVDSTPTAKLSLGSVATVNSLIACTVERIKASLSGESA

SEQ ID NO: 466 - DNA, 2280 bp, Medicago truncatula
atgttcaactcatctggtctatctttagcacttcaaacaaatttagaagcacaaggtggtgatatgaagagattaatggctgagaattttcatcaaacaaataatggtttgagaaggaatagagaagaagaagaacatgaaagctgcagatctggtagtgataacatggatggtatttctggtgatgattttgatgctgccgacaatccgccaagaaaaaagcgttatcaccgacatactcctcaacaaattcaagaacttgaatcgatgtttaaagagtgtcctcatcctgatgaaaaacaaagacttgaacttagcaaaaggctttgtttggaaacaagacaagtcaagttttggttccaaaatagaagaacacaaatgaagactcaattggaacgtcacgagaattcgctacttaggcaagcaaatgataaactaagagctgagaacatgtcaataagagaagcaatgaggaatcccatgtgttcaaattgtggaggaccagcaattattagtgaaatttcacttgaagaacaacatctaagaattgagaatgcaagactaaaagatgaattagaccgagtttgtacactcgccggcaagtttttaggccgtccaattacgtcgttaccaaactcgagtttagaaattggttttgttggtttgaacaatactttgccttcaacaatgcctttaggtcaagattttggtatggtgtcaatgtcaccaccttcaattacaagaggaacaagtatggtaacaaatactaatagtaatggttttgatagatcaatggagaggtctatgttccttgaacttgctttggctgcaatggatgagttggtgaagatggcacaaacaaatgaacctctttggattagaagtgttgaaagtggaaaagaaatttttaatcatgaggaatatacaaggattattagtactccttgtattggtttgaaaccaaatggttttgtttctgaggcttctagagaaagtggtgttgttatcataaacagcttggctcttgttgaaactttaatggattcaaatcgatggtcagagatgttcccttgtgtgattgcaagaagctccacaactgaagtgatatctagtggaataaatggaaccagaaatggtgctctacaactgatgcaagctgaacttcaagtgctttctccattggttcctgttcgtgaggtgagttttctaaggttttgcaagcaacatgcagaaggggtatgggcagtggttgatgtgtccatagataccatcagagaaacttcagctggtgcacccacttttcttacctgtaggaggcttccttctggttgtgtggttcaagatatgccaaatggttactctaaggtgacatgggtggagcatgcagaatatgaagaaagccaagttcaccagctctatagacccttgctaagcttaggcatgggttttggcgcacaacgttgggttgcaaccctacaacgccaatgcgaatgtctagcaattttaatgtcatcatcactcccctctagagaacactcagcaataagtgcgggaggaaggcgtagcatgctaaagctagcgcaccgaatgacaaacaatttttgtgccggagtgtgtgcatcgacggtgcacaaatggaacaaattgaatgcagggaacgtgggcgaggacgttagggtaatgacaaggaaaagtgtggatgatccgggtgagccaccagggattgtgcttagtgcagcaacctcagtttggctacccgcttcaccacaaaaagtatttgatttcctccgcaacgagaagcttagaagtgaatgggacatactctccaacggtggtccaatgcaagagatggctcacattgccaaaggacatgaccatggcaactgtgtctccctcctacgagctagtgctattaattcaagtcaaagtagcatgttgattttacaagaaacaagcacagacgcatcggggtcgcttgttgtgtacgctccggtggatattcctgcaatgcatgtagtaatgaacggtggcgattcagcttatgttgcgcttcttccgtcgggttttgccgtgttaccagatggacatagcaatgggagcggtaatcacgaagacgcatcacagccgagagtgagtggatcacttttgacggtagcatttcagatacttgtgaatagccttccgacggcaaagctcacggtggaatcagttgaaacggttaacaatctcatttcatgtactattcaaaagataaaagtagcacttcaatgtgagagttaa

SEQ ID NO: 467 - protein, 759 aa, Medicago truncatula
MFNSSGLSLALQTNLEAQGGDMKRLMAENFHQTNNGLRRNREEEEHESCRSGSDNMDGISGDDFDAADNPPRKKRYHRHTPQQIQELESMFKECPHPDEKQRLELSKRLCLETRQVKFWFQNRRTQMKTQLERHENSLLRQANDKLRAENMSIREAMRNPMCSNCGGPAIISEISLEEQHLRIENARLKDELDRVCTLAGKFLGRPITSLPNSSLEIGFVGLNNTLPSTMPLGQDFGMVSMSPPSITRGTSMVTNTNSNGFDRSMERSMFLELALAAMDELVKMAQTNEPLWIRSVESGKEIFNHEEYTRIISTPCIGLKPNGFVSEASRESGVVIINSLALVETLMDSNRWSEMFPCVIARSSTTEVISSGINGTRNGALQLMQAELQVLSPLVPVREVSFLRFCKQHAEGVWAVVDVSIDTIRETSAGAPTFLTCRRLPSGCVVQDMPNGYSKVTWVEHAEYEESQVHQLYRPLLSLGMGFGAQRWVATLQRQCECLAILMSSSLPSREHSAISAGGRRSMLKLAHRMTNNFCAGVCASTVHKWNKLNAGNVGEDVRVMTRKSVDDPGEPPGIVLSAATSVWLPASPQKVFDFLRNEKLRSEWDILSNGGPMQEMAHIAKGHDHGNCVSLLRASAINSSQSSMLILQETSTDASGSLVVYAPVDIPAMHVVMNGGDSAYVALLPSGFAVLPDGHSNGSGNHEDASQPRVSGSLLTVAFQILVNSLPTAKLTVESVETVNNLISCTIQKIKVALQCES

SEQ ID NO: 468 - DNA, 2166 bp, Medicago truncatula
atgtttaatactccacatcaaaaacacagcaagaacatgtatcagaataggtcaacaaggacaagagaagaagcaaaccaaatgaacatggaggctccttcaagtgatgaccaagaatccaaccaacgtcgcagaaaaaggacatatcgccgccacacacagcaacaaattgatgaaatggataccttcttcaagcagtgtcctaatcctaatgatgctcagagaagagagctgagccttcggactgggttagacccaacgcaaatcaagttttggtttcagaacaggcgcacttcactgaaggttcaaaccgatagagatgagaatgagctattaaagattgagaatgaaaaacttcgagatgaacttgatagatacaagggggcaattagtaccacatgcaaagtatgtggaagttcctctaacgctggggaaatgtcacatgaggagcagcagctaagactggagaatgctctccttaggaaagagcttgaaaggtttgtgggcgagacgccgacagactctcgtgccaatataacatcatccaacaatagcactcatgttgcttcacactctacggattttggagttgccggtggtaacaatggagcaagccaccgcatggtaggagagggtttaagcgttggtggctcctcagtgcagattaagggtcttaatgagaagcaaaagattgtagagcttgctgttgttggaatggatgaactgaccaaattggctaggacatatggaccccctctttggatccccaccaactatgtgactgagattctcaatggagaggaatacatgaagtatttcccaaggggtaatggtcccaacacatgtggattaaggcttgagggttcaaaagaatccgtggtggtcatgattaatgctcctgatcttgtagatatcctcatggatgtgaatcaatggtcaaatatgttttgcggcattgtttctagagcagcaacacttgaagtcctttcaactggagtgggaggtaactacgatggagccttgcaagtgatgacagctgagtttcaagtcccctccccacatgttcctactcgtcaaaaccattttgtgagatactgtaaactgcacccagatggaatatgggtagtggctgatgtgtccttgcatcttttaaatgcagcatctgctagtagtagtagtagcagtactgcttcaagaaccaacagaagaccctctggttgtttgattgagaccctcccaaatggtctcactaaggttacatggattgaaaatgtagaagttgatgatcaggtggtgcaaaatatatataaacctctagttaattctggacttgcatttggagctaaacgctgggtagctacattacatcgacaaagcgatcgtcttttttttagaacagccaccaacgttccacgggaacatcatgtgagattgactcctgagggaaagaaaagtatattgaatcttgcggaaaggttggtagctagctttagtacaagtattggttcttctacaacacatgcttggacaaaggtacctggaaacggaccggaggttgtaatggtcatgacaaaaagatatatcgatgaatcgagcattgacaaacccgtcagtgtagtgctaagtgctgctacttctttttggcttccagttcctccaaggagggtgtttgattttcttcgagatcaaaacacaagaaaacattgggatattctctccgccggcggtatagttcatgaattggctcacatttcaaatgggcgtgattctggcaactatgtctccttatttcgtatcactagtgaaaattcagagcagagtgatgtggtagtactgcaagagaattgcactgatgtaactggctcatatgtagtatatgcgcctgtgcaaatacctacaatgcatgaaatcctgaatggcggcgactcaagtcgtctcactctgcttccttccggattcgctatttttccagatgggtgtataacaaatggaggaccaattatgaatgttggatctggagggtctcttgtcacagttgcatttcaaattatagttgattctattccacatgcaaggctagctctgggttcaatcaccaccgttaacactttgatcaagaacactgtggaaaggattagaactgcagtgatgcctaatggcatctaa

SEQ ID NO: 469 - protein, 721 aa, Medicago truncatula
MFNTPHQKHSKNMYQNRSTRTREEANQMNMEAPSSDDQESNQRRRKRTYRRHTQQQIDEMDTFFKQCPNPNDAQRRELSLRTGLDPTQIKFWFQNRRTSLKVQTDRDENELLKIENEKLRDELDRYKGAISTTCKVCGSSSNAGEMSHEEQQLRLENALLRKELERFVGETPTDSRANITSSNNSTHVASHSTDFGVAGGNNGASHRMVGEGLSVGGSSVQIKGLNEKQKIVELAVVGMDELTKLARTYGPPLWIPTNYVTEILNGEEYMKYFPRGNGPNTCGLRLEGSKESVVVMINAPDLVDILMDVNQWSNMFCGIVSRAATLEVLSTGVGGNYDGALQVMTAEFQVPSPHVPTRQNHFVRYCKLHPDGIWVVADVSLHLLNAASASSSSSSTASRTNRRPSGCLIETLPNGLTKVTWIENVEVDDQVVQNIYKPLVNSGLAFGAKRWVATLHRQSDRLFFRTATNVPREHHVRLTPEGKKSILNLAERLVASFSTSIGSSTTHAWTKVPGNGPEVVMVMTKRYIDESSIDKPVSVVLSAATSFWLPVPPRRVFDFLRDQNTRKHWDILSAGGIVHELAHISNGRDSGNYVSLFRITSENSEQSDVVVLQENCTDVTGSYVVYAPVQIPTMHEILNGGDSSRLTLLPSGFAIFPDGCITNGGPIMNVGSGGSLVTVAFQIIVDSIPHARLALGSITTVNTLIKNTVERIRTAVMPNGI

SEQ ID NO: 470 - DNA, 2307 bp, Medicago truncatula
atgtctaataataatcctccttctacttctaaagccaaagacttctttccctctccagctctctctcttagcctagcggggatatttcggcatggtggcggtgcggcggcggagggtgaaggagggagtattagtaacatggaggtggaagaaggggaggaagggagtacaataggaggtgagcgtgtggaggaaattagcagtgagtattcaggtccagctaaatccaaatcaatagatgaatatgaaggagatgaacttgaagatgatgaaggtgaagatgatgaaggtgatggtgatggtgatggtgatggtgttaataagaacaagaagaagaaaaggaagaaatatcacaggcacacttctgaacagatcagagtcatggaagcgcttttcaaagagtcaccacatcctgatgaaaagcaaaggcaacaacttagcaagcaattaggacttgctcctaggcaagtcaaattttggttccaaaatcgtcgtacccaaatcaaggcaatacaagagcgacatgaaaattcattgttgaaatcagaaatagagaaactaagggagaaaaataagaccctacgagagaccataaataaggcttgttgccccaattgtggggtccccaccacaaatagagatggtaccatggcaactgaagaacaacaactacgtattgaaaatgccaaactcaaagctgaggtagagaggctgagagcagctttagggaaatatgcatcagggacaatgtcaccttcatgttccactagccatgaccaagagaatattaaaagctctttggatttttatactggaattttttgtcttgatgagtcaagaataatggatgtagtaaaccaagcaatggaggagcttatcaagatggctacaatgggtgaaccaatgtggttacgtagcttagagaccggtcgcgaaatacttaactatgatgaatatatgaaggagtttgcagatgaaaattcagaccatggaagaccaaagagatccattgaagcttcaagagatacaggagttgtttttgcagatcttcctcggattgtccaatgctttcttgatgctaatcaatggaaggaaatgtttccatgtttaatatctaaggcagcaacagttgacactatatgcaaaggagaaggttctaacaagaatggtgcagtgcaactgatgtttgctgagttgcaaatgttaacaccaatggttccaactagagaagtgtattttgtcagatactgcaaacggttgagtggtgaaaaatgggctattgttgatgtgtccatagacaaagtagaagacaacattgacaagtccttagtgaaatgcagaaaacgcccatctggttgcattattgaggataagtcaaatggacattgcaaagtagtatgggtggagcatttggagtgccaaaagagtatagttcattcaatgtatcgcaccattgtcaacagcggcctagcttttggggcaaggcattggattgcgacccttcaacttcaatgcgaacgtctagttttcttcatggcaacaaacgttcccatgaaggattcaaccggagttgccacattggccggaagaaaaagcattttgaagttggcacaaagaatgacatggagtttctgtcaagcaattagtgcttcaagcttccatacatggactaaggttacaagtaaaactggagaagacataaggattagctctagaaagaacttgaatgatcctagtgaacctcttggattgatagtttgtgcagtttcttctatatggttgcctatatctcctaatgttttgtttgatttcttgagggacgaaactcgtcgaactgagtgggatataatgtctaatggtgggacagtgcaatccattgcaaatttagccaaaggacaagacagaggcaatgcagtaactatccaaacaattaaatcaaaagaaaacaatatgtggatactgcaagatagctgcacaaattcttacgagtcaatggtggtatatgcacctgcggatattactggtattcaatctgtgatgaccggatgcgactcgagcaatcttgccatactaccctcaggattttcaattgtttctgatggtttggagtcaaggcaaatggtaattacttcgaggcgggaagagaaaaatacagaaggtggatctttgtttacaatagcattccaaatccttacaaatgcttctcctacagccaaattaactatggagtctgtggactctatgaactctcttgtatcatgtacattgagacacatcaaaacaagtctaaattgcgaagatggttag

SEQ ID NO: 471 - protein, 768 aa, Medicago truncatula
MSNNNPPSTSKAKDFFPSPALSLSLAGIFRHGGGAAAEGEGGSISNMEVEEGEEGSTIGGERVEEISSEYSGPAKSKSIDEYEGDELEDDEGEDDEGDGDGDGDGVNKNKKKKRKKYHRHTSEQIRVMEALFKESPHPDEKQRQQLSKQLGLAPRQVKFWFQNRRTQIKAIQERHENSLLKSEIEKLREKNKTLRETINKACCPNCGVPTTNRDGTMATEEQQLRIENAKLKAEVERLRAALGKYASGTMSPSCSTSHDQENIKSSLDFYTGIFCLDESRIMDVVNQAMEELIKMATMGEPMWLRSLETGREILNYDEYMKEFADENSDHGRPKRSIEASRDTGVVFADLPRIVQCFLDANQWKEMFPCLISKAATVDTICKGEGSNKNGAVQLMFAELQMLTPMVPTREVYFVRYCKRLSGEKWAIVDVSIDKVEDNIDKSLVKCRKRPSGCIIEDKSNGHCKVVWVEHLECQKSIVHSMYRTIVNSGLAFGARHWIATLQLQCERLVFFMATNVPMKDSTGVATLAGRKSILKLAQRMTWSFCQAISASSFHTWTKVTSKTGEDIRISSRKNLNDPSEPLGLIVCAVSSIWLPISPNVLFDFLRDETRRTEWDIMSNGGTVQSIANLAKGQDRGNAVTIQTIKSKENNMWILQDSCTNSYESMVVYAPADITGIQSVMTGCDSSNLAILPSGFSIVSDGLESRQMVITSRREEKNTEGGSLFTIAFQILTNASPTAKLTMESVDSMNSLVSCTLRHIKTSLNCEDG

SEQ ID NO: 472 - DNA, 2406 bp, Medicago truncatula
atgtatggtgattgtcaagttatgtcaacaatgggagggaatgtagtagtaaactcagaatctctcttctcttctccgatccataactctaacttcaacttcatgtcaaccatgccttttcaaccattttcttcttccatgaaagaagaagaaggaattttgagaggtaaagaagagataatggatcaaagtggttcaggtagtgaacaagttgaagataaatcaggaaatgaacaagagattaataatgaacaacaagctacaaagaagaaacgttatcatcgacacactgctcgtcagatccaagaaatggaagctttgttcaaggaatgtccacacccagatgataaacaaagactgaaactaagccatgatttgggactgaaaccacgccaggttaagttctggtttcagaatcgtcgaactcagatgaaggcacaacaagatcgttctgataatgtgatacttagagcagagaatgagagtttgaagaatgagaactataggctacaatcggcgttacgtaatattttatgtcctaattgtggtgggccatgtataatgggacctgatatgggttttgatgatcaccaacttcgatttgaaaatgcccggttaaaagaggagctagaacgtgtgtgctgtataacatcaagatacactggtcgtccactccaaacaatggcaccaccttcatctcttatgccaccatcactggacttagacatgaacatttatccaaggcactttgatccaatgccaccatgcactgaaatgattcctgtccctatgttaccacctgaaccttcacaatttcaagagggaggtctcttattaatggaagatgaaaaatcacttgctatggaacttgcagcttcttctatggctgagcttgttaagatgtgtcaaatgaatgaaccactttggattcgtagcgagaatgatagagaagttcttaattttgatgagcatgctagggtttttcaatggcctttgaatcttaagcaaaggaatgagttaaggaatgaagctacgcgtgattctgctgttgtaatcatgaatagtgttactcttgttgatgcttttcttgatgctcaaaaatggatggaattgtttccaacaattgttgctagagcaagaactgttcaaattatagcttcaggtgcttctggccatgcaagtgggactcttcagctgatgcacgcagaattccaagttctttctccgttggtgtccaccagagagactcattttcttcgatattgtcagcaaaatgccgaggaaggaacctgggccattgttgattttcctgttgatagcttccaacaaaactttcacaattcttgtcccaaatactgcagaaggtcctctggctgtgtgattcaagacatgccaaatggctattcgagggtaacatgggttgagcatgcaaaagttgtagagaaacctgtccatcaaatatttagtaactatgtgtatagtggtatggcatttggtgcacaacgttggttaggagttttgcagaggcaatgtgaaagggttgcaagccttatggctagaaacatatcagatcttggagtgataccttctccggaagcgcgaaagagcttgatgaaattagcaaaccggatgataaaaacttttagccttaatatgaccacttgtggtggacaatcatggactgctatatcggattcaccagaagacactgttagaatcacaactaggaaaatcactgagcctggccaacctagtggagtgattctcgccgcagtttcaaccacttggcttccttatactcataccaaagtctttgatctccttcgtgacgaacgccacagatctcagatggatgcactttctaatgggaactcattaaatgaagtggctcatattgctaacggttcacatccgggaaactgcatttcccttcttcgcataaatgtagcaagtaactcatctcaaaatgtagagctaatgctgcaagagagttgcacagatcaatcaggaagcttagtagtctacacaacagtcgatgttgattcggtccaactagctatgagtggacaagacccttcatgcattgcacttcttccacaagggttcatgatagtgccaatggtttcatcaaatgctgatacatcatctgaacaaggtgtcacaggaacaccatcatctactgctagtgccaatgctgctaactcaggttgtcttcttatcatgggaatgcaagttctagcaagcacaattccttctgcaaagcttaacctttcaagtgtcacagcaatcaataaccacctctgcaatacccttcatcaaattgaaagtgctctttgtagcagcagtaacaacaattgctttgttggttcttgcaatgaaccaaccactagtgcaccttccaagtag

SEQ ID NO: 473 - protein, 801 aa, Medicago truncatula
MYGDCQVMSTMGGNVVVNSESLFSSPIHNSNFNFMSTMPFQPFSSSMKEEEGILRGKEEIMDQSGSGSEQVEDKSGNEQEINNEQQATKKKRYHRHTARQIQEMEALFKECPHPDDKQRLKLSHDLGLKPRQVKFWFQNRRTQMKAQQDRSDNVILRAENESLKNENYRLQSALRNILCPNCGGPCIMGPDMGFDDHQLRFENARLKEELERVCCITSRYTGRPLQTMAPPSSLMPPSLDLDMNIYPRHFDPMPPCTEMIPVPMLPPEPSQFQEGGLLLMEDEKSLAMELAASSMAELVKMCQMNEPLWIRSENDREVLNFDEHARVFQWPLNLKQRNELRNEATRDSAVVIMNSVTLVDAFLDAQKWMELFPTIVARARTVQIIASGASGHASGTLQLMHAEFQVLSPLVSTRETHFLRYCQQNAEEGTWAIVDFPVDSFQQNFHNSCPKYCRRSSGCVIQDMPNGYSRVTWVEHAKVVEKPVHQIFSNYVYSGMAFGAQRWLGVLQRQCERVASLMARNISDLGVIPSPEARKSLMKLANRMIKTFSLNMTTCGGQSWTAISDSPEDTVRITTRKITEPGQPSGVILAAVSTTWLPYTHTKVFDLLRDERHRSQMDALSNGNSLNEVAHIANGSHPGNCISLLRINVASNSSQNVELMLQESCTDQSGSLVVYTTVDVDSVQLAMSGQDPSCIALLPQGFMIVPMVSSNADTSSEQGVTGTPSSTASANAANSGCLLIMGMQVLASTIPSAKLNLSSVTAINNHLCNTLHQIESALCSSSNNNCFVGSCNEPTTSAPSK

SEQ ID NO: 474 - DNA, 2355 bp, Oryza sativa
atgacgccggcgaggcgcatgccgccggtgatcggccggaacggcgtggcgtacgaatcgccgtcggcgcagctgcccctcacccaggctgatatgctggacagccatcatctgcagcaagcactccagcagcaatacttcgatcagatcccggtgacgacgacggcggcggcggacagcggcgacaacatgctgcacggccgcgccgacgccggcgggctggttgacgagttcgagagcaagtcgtgcagcgagaacgtcgacggcgccggcgacggcctctccggcgacgaccaggaccccaaccagcggccgcgcaagaagcgttaccaccgccatacccagcaccagatccaagagatggaagctttcttcaaggagtgcccgcacccagacgacaagcagcgcaaggagctgagcagggagctgggtcttgaacctctgcaggttaaattctggtttcagaacaagcgcacacagatgaagaaccagcacgagaggcacgagaacgcgcagctgcgggcggagaacgacaagctgcgcgcggagaacatgcgatacaaggaggccctgagcagcgcgtcgtgccccaactgcggcggccccgccgccctcggcgagatgtccttcgacgagcaccacctccgcgtcgagaacgcccgcctccgcgacgagatcgaccgcatctccggcatcgccgccaagcacgtcggcaagccccccatcgtctccttccccgtcctctcctccccgctcgccgtcgccgccgcccgctcccctctcgacctcgccggcgcctacggcgtcgtcacccccggcctcgacatgttcggcggcgccggcgacctcctccgcggcgtgcacccgctcgacgccgacaagcccatgatcgtggagctcgccgtcgccgccatggacgagctcgtccagatggcccagctcgacgagccgctctggtcgtcgtcgtcggagccggcggcggcgttgctcgatgaggaggagtacgcgcgcatgttcccgcgcggcctcggccccaagcagtacggcctcaagtcggaggcgtcccgccatggcgccgtcgtcatcatgacgcacagcaacctcgtcgagatcctcatggatgtgaatcaattcgcgacggtgttctcgagcatcgtgtcgagagcgtccacgcacgaggtgttgtccacaggcgtggcaggcaactacaatggtgcactgcaagtgatgtcaatggagtttcaagtgccgtcgccgctggtgccgacgagggagagctatttcgtcaggtactgcaagaacaactccgacgggacatgggccgtcgtcgatgtctctctcgacagcctccgccccagccctgtccagaaatgccggcgcaggccgtctggctgcctcatccaagaaatgcccaatggctactccaaggtgacatgggtggagcatgtggaggtggacgacagctcggtgcacaacatctacaagccattggtgaactccggcctcgcattcggcgcgaaacggtgggtcggcacgctggaccggcaatgcgagcgcctcgccagcgccatggccagcaacatccccaatggcgaccttggagtgattacaagcgtggaggggaggaagagcatgttgaagctggcggagaggatggtggcgagcttctgcggcggcgtgacggcgtcggtggcgcaccagtggacgacgctgtcgggcagcggggcggaggacgtgcgcgtcatgacgaggaagagcgtcgacgaccccggcaggccaccgggcatcgtgctcaacgccgccacctccttctggctccccgtccctcccgccgccgtcttcgacttcctccgcgacgagacctctcgcagcgagtgggacattctgtccaacggcggcgccgtccaagaaatggctcacattgccaacggccgtgaccatggcaactctgtctcgcttcttcgtgtcaatagtgcaaattcaaaccagagcaacatgctgatcctgcaagagagctgcacggacgcgtcgggctcctacgtggtgtacgcgccggtggacatcgtggcgatgaacgtggtgctcaacggcggcgacccggactacgtggcgctgctgccgtcggggttcgccatccttcccgacgggccgtcggggaacgcgcaggccgccgtcggggagaacggctccggctccggcggggggtccctcctgacggtggcgttccagatcctcgtcgactccgtgccgacggcgaagctctcgctgggctccgtcgcgacggtgaacagcctcatcgcctgcacggtggagcgcatcaaggccgccgtctgcagggacagcaaccctcagtag

SEQ ID NO: 475 - protein, 784 aa, Oryza sativa
MTPARRMPPVIGRNGVAYESPSAQLPLTQADMLDSHHLQQALQQQYFDQIPVTTTAAADSGDNMLHGRADAGGLVDEFESKSCSENVDGAGDGLSGDDQDPNQRPRKKRYHRHTQHQIQEMEAFFKECPHPDDKQRKELSRELGLEPLQVKFWFQNKRTQMKNQHERHENAQLRAENDKLRAENMRYKEALSSASCPNCGGPAALGEMSFDEHHLRVENARLRDEIDRISGIAAKHVGKPPIVSFPVLSSPLAVAAARSPLDLAGAYGVVTPGLDMFGGAGDLLRGVHPLDADKPMIVELAVAAMDELVQMAQLDEPLWSSSSEPAAALLDEEEYARMFPRGLGPKQYGLKSEASRHGAVVIMTHSNLVEILMDVNQFATVFSSIVSRASTHEVLSTGVAGNYNGALQVMSMEFQVPSPLVPTRESYFVRYCKNNSDGTWAVVDVSLDSLRPSPVQKCRRRPSGCLIQEMPNGYSKVTWVEHVEVDDSSVHNIYKPLVNSGLAFGAKRWVGTLDRQCERLASAMASNIPNGDLGVITSVEGRKSMLKLAERMVASFCGGVTASVAHQWTTLSGSGAEDVRVMTRKSVDDPGRPPGIVLNAATSFWLPVPPAAVFDFLRDETSRSEWDILSNGGAVQEMAHIANGRDHGNSVSLLRVNSANSNQSNMLILQESCTDASGSYVVYAPVDIVAMNVVLNGGDPDYVALLPSGFAILPDGPSGNAQAAVGENGSGSGGGSLLTVAFQILVDSVPTAKLSLGSVATVNSLIACTVERIKAAVCRDSNPQ

SEQ ID NO: 476 - DNA, 2415 bp, Oryza sativa
atgagctttgggggcctctttgacggcggcggcgggggaggcatgcagttccctttcgccagtggcttcgcgtcctcgccggcgctctccctcgcgctggacaacgccggcggtggcatcggcgggcggatgctcggcggcggcgctggcgctggttctagcgcgggcggcgcgatgacgagggacactgaggcggagaacgacagccggtcgggaagcgaccatctcgacgccatctcggccgccggcgaggacgacgtcgaggacgccgagcccagcaactcccgcaagaggaagaagcgataccaccgccacacgccgcagcagatccaagagctcgaagcgctgttcaaggagtgcccccatccggacgagaagcagcgcgccgagctcagcaggaggctctccctcgatgcgcggcaggtcaagttctggttccagaatcgccgcacgcagatgaagacgcaactggagcggcacgagaacgcgcttctcaagcaggagaacgacaagctgcgcgccgagaacatgacgatccgggaggcgatgcgcagcccaatgtgcggcagctgcgggagccccgccatgctcggggaggtgtccctagaggagcagcacctgcgcatcgagaatgcgcgcctcaaggacgagctcaaccgcgtgtgcgccctcgccaccaagttcctaggcaagcccatctccctcctgtcgccgccgcccttgctgcagccgcacctctcgctgcctatgcctaactcgtcgctggagctagcgatcggaggcatcggtggcttagggtctctcggtacactacccggctgtatgaatgagttcgccggaggcgtgtcgagcccgatgggcacggtgatcacgcctgcgcgcgcaaccggggctgctataccatcgctggtgggtaacatcgacaggtccgtgttcttagagcttgcaatcagcgcgatggacgaacttgtcaagatggcacagatggacgatccattgtgggttccggcactgcctggttctcccagcaaggaggtgctcaactttgaggagtatcttcactccttcctaccgtgcattggcatgaagcctgccggctacgtctctgaggcctcgagggaatccggtctagtcatcatcgacaacagccttgcccttgtagagaccctcatggatgagagacggtggtctgacatgttctcgtgcatgattgctaaggcaacagtgcttgaggaggtgtctaccggcattgcaggaagcagaaatggcgcgttgctgctgatgaaggctgagctacaggtgctctcacctctagtaccaattagggaggttacatttctccggttttgtaagcagctggctgagggtgcatgggcagtagttgatgtgtccattgatggtttagtgagagatcataattctggaacggcacccacaggtggaaatgtgaagtgtaggagggtaccttccggctgtgtgatgcaagacactcccaatgggtattgcaaggtcacatgggttgagcatacggaatacgatgaggcatcagtgcaccagctctaccgtccactccttcggtctggtctcgcctttggcgccaggcgttggcttgcgacgctgcagcgccaatgcgaatgccttgccatcctcatgtcctctgctacagtgacagcaaatgactcgactgctatatcgcaagagggcaagcgaagcatgctgaagctggcacgccggatgacggagaacttctgtgctggggtgagcgcatcgtctgcacgtgaatggagcaagctggatggtgcgaccggtagcatcggggaggacgtgcgcgtgatggcacggaagagcgtgagcgagcctggagagccaccgggcgtggtgctgagcgcggccacctcggtgtgggtgcccgtggctccggagaagctcttcaacttcctgcgcgatgagcagctgcgtgcggagtgggacatcctcagcaatggaggccccatgcaggagatgacccagatcgccaaggggcagcgggatgggaactcggtttcactcctcagggccagtgctgtgagtgccaaccagagcagcatgctgatacttcaggagacgtgcaccgacgcttctggctccattgttgtgtacgctccggtagacatcccggcaatgcagcttgtcatgaatggtggcgactccacctatgttgctctgcttccatccggattcgccatcctgcccgatgggcctcgcatcggcgccaccgggtacgagacgggcggctctctgctcaccgtggcgttccagattcttgtcaacaaccagcccaccgccaagctcaccgtggaatcggtcgagaccgtgaacaatctcatctcctgcaccatcaagaagatcaagacggcgctgcagtgcgacgcctga

SEQ ID NO: 477 - protein, 804 aa, Oryza sativa
MSFGGLFDGGGGGGMQFPFASGFASSPALSLALDNAGGGIGGRMLGGGAGAGSSAGGAMTRDTEAENDSRSGSDHLDAISAAGEDDVEDAEPSNSRKRKKRYHRHTPQQIQELEALFKECPHPDEKQRAELSRRLSLDARQVKFWFQNRRTQMKTQLERHENALLKQENDKLRAENMTIREAMRSPMCGSCGSPAMLGEVSLEEQHLRIENARLKDELNRVCALATKFLGKPISLLSPPPLLQPHLSLPMPNSSLELAIGGIGGLGSLGTLPGCMNEFAGGVSSPMGTVITPARATGAAIPSLVGNIDRSVFLELAISAMDELVKMAQMDDPLWVPALPGSPSKEVLNFEEYLHSFLPCIGMKPAGYVSEASRESGLVIIDNSLALVETLMDERRWSDMFSCMIAKATVLEEVSTGIAGSRNGALLLMKAELQVLSPLVPIREVTFLRFCKQLAEGAWAVVDVSIDGLVRDHNSGTAPTGGNVKCRRVPSGCVMQDTPNGYCKVTWVEHTEYDEASVHQLYRPLLRSGLAFGARRWLATLQRQCECLAILMSSATVTANDSTAISQEGKRSMLKLARRMTENFCAGVSASSAREWSKLDGATGSIGEDVRVMARKSVSEPGEPPGVVLSAATSVWVPVAPEKLFNFLRDEQLRAEWDILSNGGPMQEMTQIAKGQRDGNSVSLLRASAVSANQSSMLILQETCTDASGSIVVYAPVDIPAMQLVMNGGDSTYVALLPSGFAILPDGPRIGATGYETGGSLLTVAFQILVNNQPTAKLTVESVETVNNLISCTIKKIKTALQCDA

SEQ ID NO: 478 - DNA, 2106 bp, Oryza sativa
atgcagttcccgttctccggcgctggcccgggcgtcttcacgtcatcgccggcgctctccctcgcgctggcggacgcggtggcaggccggaacagcggcggcggtgggaagatggttaccgcggcccatggcggcgtcggcggaggaggaggaggaggacgcgcgaaggcgagggacgcgttggaggtggagaacgagatgagccggtccgggagcgaccacctcgacgtcgtctcttgcggcgacgcgggcggcggcggcggcgacgacgacgatgacgaggacgccgagcacggcaacccgcccaagcgcaagaagcggtaccaccgccacacgccgcagcagatccaagagctggaagcgatgttcaaggaatgcccccacccagacgagaagcagcgcgccgagctgagcaagcggctcggcctcgaaccccggcaggtcaagttctggttccagaatcggcgaacgcagatgaagatgcaactggagcgacacgagaactcgctgctgaagcaggagaacgataagctgcggtccgagaacctgtcaatccgggaggccacgagcaacgcggtgtgcgttggctgcggcggcccggcgatgctcggggaggtgtccctggaggagcaccaccttcgcgtcgagaacgcgaggctcaaggacgagctcagccgagtgtgcgcgctcgccgccaagttccttggcaagtccatctctgtcatggcgccaccgcagatgcatcagcctcatcctgtgccaggctcgtcgctggagcttgcggttgggggtatcggttcgatgccatcagccacgatgcccatctcgacgatcactgattttgctggcgccatgtccagttcaatgggcacggtgatcacgcccatgaagtctgaggctgaaccatcggcaatggctggcattgacaagtccttgttcttggagctagcaatgagtgcaatggatgagctagtcaagatggctcagatgggggatccgctatggattccaggtgcctccgtaccttcctcgccggcaaaggagagtctaaacttcgaggagtacctaaacaccttcccaccttgcatcggggtgaagcctgaagggtatgtatcagaggcatctagagaatctggcattgtcatcattgacgatggcgccgcgcttgtggagaccctcatggatgagcgacggtggtccgatatgttctcatgcatgattgccaaggcatcaaccactgaggagatttctactggtgttgctgggagtagaaatggtgcattgcttcttgtgagtgatgaacattctgttatgcaggcagagctacaggtgctttctcctcttgtgcctattagagaggtgaagtttctcaggttctccaaacagctggctgatggtgtatgggctgtagtggacgtttcggctgatgaattgatgagggatcagggcattacttctgcatcctcgactgcaaacatgaactgccgaaggctgccttctggttgtgtgctgcaggacactccaaatgggtttgttaaggtcacatgggttgaacatacagaatatgatgaggcatctgtgcacccgctctaccggcctcttctccggtctggtcttgcccttggtgcagggcgatggatcgcgacattacagcggcagtgcgaatgcttggcccttctcatgtcttctattgcattgccagagaacgactcatcagctatccatcctgaaggtaaacggagcatgttgaagttggcaaggaggatgacggacaacttctgtgcaggggtgagcacatcatctacccgtgaatggagcaaactggttggattgacaggcaacattggggaggatgtgcatgtaatggcgcggaagagtgtggatgaacctggaacgccgccaggtgtggtgcttagtgctgctacatctgtgtggatgcctgtgatgcctgaacggctcttcaacttcttgcacaacaaggggctgcgtgctgaatgggatatcctcagcaatggtggccctatgcaggaggtgacaagcattgccaaggggcaacagaatggcaataccgtatgtctactgaaggctagtgtgagtattagctaa

SEQ ID NO: 479 - protein, 701 aa, Oryza sativa
MQFPFSGAGPGVFTSSPALSLALADAVAGRNSGGGGKMVTAAHGGVGGGGGGGRAKARDALEVENEMSRSGSDHLDVVSCGDAGGGGGDDDDDEDAEHGNPPKRKKRYHRHTPQQIQELEAMFKECPHPDEKQRAELSKRLGLEPRQVKFWFQNRRTQMKMQLERHENSLLKQENDKLRSENLSIREATSNAVCVGCGGPAMLGEVSLEEHHLRVENARLKDELSRVCALAAKFLGKSISVMAPPQMHQPHPVPGSSLELAVGGIGSMPSATMPISTITDFAGAMSSSMGTVITPMKSEAEPSAMAGIDKSLFLELAMSAMDELVKMAQMGDPLWIPGASVPSSPAKESLNFEEYLNTFPPCIGVKPEGYVSEASRESGIVIIDDGAALVETLMDERRWSDMFSCMIAKASTTEEISTGVAGSRNGALLLVSDEHSVMQAELQVLSPLVPIREVKFLRFSKQLADGVWAVVDVSADELMRDQGITSASSTANMNCRRLPSGCVLQDTPNGFVKVTWVEHTEYDEASVHPLYRPLLRSGLALGAGRWIATLQRQCECLALLMSSIALPENDSSAIHPEGKRSMLKLARRMTDNFCAGVSTSSTREWSKLVGLTGNIGEDVHVMARKSVDEPGTPPGVVLSAATSVWMPVMPERLFNFLHNKGLRAEWDILSNGGPMQEVTSIAKGQQNGNTVCLLKASVSIS

SEQ ID NO: 480 - DNA, 2616 bp, Oryza sativa
atgagcttcggtggcatgttcgatggcgccggctccggcgtcttctcctacgacgccggcggcggcggcggcggcggcggagtacacaactcccgcctcctccctacgccgcccgtccccaagcccggcggcgggttcgccgctcccggcctctctctcggcctgcaaactatggacggtagccagctcggcgacgtgaaccggtcgcttgccatgatgggcaacggcgggagcggcagcggcggcgacggcgactcgctgggacgcggccgggaggaagagaacgacagccgctccggcagcgacaacctggacggcgcctccggcgacgaactcgacccggacaacagcaacccgcgcaagaagaagaagcgttatcaccgccacaccccgcagcaaatccaagaactcgaagccgtgttcaaggagtgtccacatcctgacgagaagcaacggatggagctcagccggcggctcaacctcgagagccgccaggtcaagttctggttccagaatcgccgcacccagatgaagacgcagatcgagcggcatgagaacgcgctgctgcggcaggagaacgacaagctgagggcggagaacatgacgatccgggaggcgatgaggaacccgatgtgcgcgagctgcggcggcgcggcggtgctcggcgaggtgtcgctggaggagcagcacctgcgcatcgagaacgcgcggctcaaggacgagctcgaccgcgtctgcgcgctcgccggcaagttcctcggccggccaatctcgagcatctcctccccgggcccgccgtcgctgcaggcgtgctccggcctcgagctcggcgtcggcagcaacggcgggttcgggctcggcgcgctcggggcctcggcggcgatgcagtccatccccgacctgatgggcggctcctccggcctgacgggggggcccgtgggctccgccgccatgcgcctacccgcgggcattggcggcctcgacggcgccatgcacgccgcggcggccgacggcggcgccatcgaccgcgccgtgctcctggagctcgccctcgcggccatggacgagctcgtcaaggtggcgcagatggacgagccgctctggctccccagcctcgacggcgggttcgagacgctcaactacgacgagtaccaccgcgcgttcgccagggtggtcggccagtgccccgccggctacgtctccgaggcgacgcgcgagtccggcatcgccatcatcagcagcgtcgacctcgtcgacagcctcatggacgcgccacggtggtcggagatgttcccgtgcgtggtggcgagagcgagcaccacggacatcatctccagcggcatgggcggcacgcgcagcgggtcaattcaactgatgcacgcggagctgcaggtgctgtcgccgctggtgccgatacgggaggtggtgttcctgcgtttctgcaagcagcacgccgagggcctctgggcggtggtcgacgtctcggtcgacgccgtcctccgccccgaccagaacggcggcggcgggtcgtcgtcgtcgtcgtacatgggctgccgcctcctccccaccggctgcatcgtgcaggacatgaacaatggctactccaaggtcacgtgggtggttcacgcggagtacgacgagacggcggcgcaccagctctaccggccgctgctccgctccggccaggccctcggcgcccgccgctggctcgcctcgctccagcgacagtgccagtatctcgccatcctctgctccaactccctccccgcccgcgaccacgctgcgataacgccggtggggaggaggagcatgctgaagctggcgcagcggatgacggacaacttctgcgcgggggtgtgcgcgtcggcggcgcagaagtggcggcgcctggacgagtggcgcggcgagggtgggggcggcggcggtggcggcggcggggacggggaggacaaggtgcggatgatggcgcggcacagcgtgggcgcgccgggggagccgccgggcgtcgtgctgagcgccaccacgtcggtgcggctccccggcacgctgccgcagcgcgtgttcgactacctccgcgacgagcagcggcgcggcgactgggacatccttgccaacggcgaggccatgcaggagatggaccacatcgccaagggccagcaccacggcaatgccgtctccctcctccgtccaaatgccacaagcgggaaccagaacaacatgctgatcctccaggagacgtgcaccgactcatcgggctccctcgtcgtctacgctccggtggacgtgcagtcgatgcacgtcgtcatgaacggcggcgactccgcctacgtctccctcctcccctccggcttcgccatcctccccgacggccacaacaatggcgcctcgccgtctccggcagaggtcggcagcggcgcctcgccgaactccgccgccggtggcggtggcggtagcaacaacaccgggtcgctggtgacggtggcgttccagatactcgtcaacaacctgccgacggcgaagctcaccgtggagtccgtcgacaccgtcagcaacctcctctcctgcaccatccagaagatcaagtcggcactgcaggccagcatcatctcaccatag

SEQ ID NO: 481 - protein, 871 aa, Oryza sativa
MSFGGMFDGAGSGVFSYDAGGGGGGGGVHNSRLLPTPPVPKPGGGFAAPGLSLGLQTMDGSQLGDVNRSLAMMGNGGSGSGGDGDSLGRGREEENDSRSGSDNLDGASGDELDPDNSNPRKKKKRYHRHTPQQIQELEAVFKECPHPDEKQRMELSRRLNLESRQVKFWFQNRRTQMKTQIERHENALLRQENDKLRAENMTIREAMRNPMCASCGGAAVLGEVSLEEQHLRIENARLKDELDRVCALAGKFLGRPISSISSPGPPSLQACSGLELGVGSNGGFGLGALGASAAMQSIPDLMGGSSGLTGGPVGSAAMRLPAGIGGLDGAMHAAAADGGAIDRAVLLELALAAMDELVKVAQMDEPLWLPSLDGGFETLNYDEYHRAFARVVGQCPAGYVSEATRESGIAIISSVDLVDSLMDAPRWSEMFPCVVARASTTDIISSGMGGTRSGSIQLMHAELQVLSPLVPIREVVFLRFCKQHAEGLWAVVDVSVDAVLRPDQNGGGGSSSSSYMGCRLLPTGCIVQDMNNGYSKVTWVVHAEYDETAAHQLYRPLLRSGQALGARRWLASLQRQCQYLAILCSNSLPARDHAAITPVGRRSMLKLAQRMTDNFCAGVCASAAQKWRRLDEWRGEGGGGGGGGGGDGEDKVRMMARHSVGAPGEPPGVVLSATTSVRLPGTLPQRVFDYLRDEQRRGDWDILANGEAMQEMDHIAKGQHHGNAVSLLRPNATSGNQNNMLILQETCTDSSGSLVVYAPVDVQSMHVVMNGGDSAYVSLLPSGFAILPDGHNNGASPSPAEVGSGASPNSAAGGGGGSNNTGSLVTVAFQILVNNLPTAKLTVESVDTVSNLLSCTIQKIKSALQASIISP

SEQ ID NO: 482 - DNA, 2649 bp, Oryza sativa
atgcgcaggatgttcggggactgccaggtcctgtcgtccatggccgccatggccggggccgcctcctccgccgacgcgctcttcgcctcgccgctcatccccaaccccgctctcgccggcttcatgtcctcctccgccgccatgcccttccaccacttctccaacgccgccgccaccttaatacctaaggaggaggggttgatgggcggcctccatgtggccaaggacgaggggatggacctcgagatggacatggagctcagtggcggctccggcagcgcccacctcgacggcctcctcagcttcgccgacgtcgacgacgaccacaagccgcagcacagcggccatgaccagccgcccgacgccgcccagcccagcggcgccgcggggggcaacgccaagaagaagcgctaccaccgccacacggcgcaccagatccagcagatggaggcgctgttcaaggagtgcccgcatccggacgacaagcagcggctgaagctgagccaggaactgggcctcaaacctcgccaggtcaagttctggttccagaatcgccggacccagatgaaggcgcagcaggacagggcggacaacgtgattctgcgcgcggagaacgagaacctcaagagcgacaacttccgcctccaggccgccatccgcaacgtcgtctgccccaactgcggccacgccgccgtcctcgccgacatgtcctacgaggagcagcagctccgcatcgagaacgccaggctcaaagacgagcttgaccgcttggcctgcatcgccacccgctacggcggcggcggcggacggcagccggtgctgtcgacgtcggccctgagctgcatctcggcgccgccgccggtcctcatgccaccgctcgacctcgacatgaacgtctactcgcggcacttcgccgagcaggcgccggtcatgggctgcggcgacctcatcccgccacccgtcgtgccgcagcacgatggcgcggcggcgtacatgggcgccatgatggcgcccgtgcaggagcaggacaagcagctggtggtcgacctcgccgccacggcggcggaccagctcgccaggatgtgccgcgccggcgagccgctgtgggtgcggcagcgtggcgcggaggtgatggccgtggaggagcacgcgcggatgttcagctggccggtggacggcgcgaagcagggagacggcggcgcggtggcgagggcggaggggacgcgtgacaacgcggtggtcatcatgaacagcatcaacttggtggacgccttcctcgatgcgaacaaatggatggagctgttcccgtcgattgtttgcaaggcaagaacaatccagatcataaaccacggagctgcgtctggtcacctcggcagtggaactctcctcttgatgcaagcagaggtgcagttcttgtcgcctctggtggcggcgcgcgaggtggtgttcttccgttactgcgtgcacaacgccgacgaggggagctgggcgatcgtggatttcccggcggaagggtttgaggaggggctcctccaagcctcggtggtcaggtgccggcggcggccgtccggctgcatcatccaggacatgcccaatggatactccagggtggtgtgggtggagcacatggagatggtcggggaggagaagccgctgcagccggtgttcagggactacgtcgccagcggcgccgccttcggggccacgcgctggctctccatcctccagcgccagtgcgagcgcctcgccagtgagctcgcccgtaacatcgccgacctcggagtgatccgcacccctgaggcaagaacaaatatgatgaagctgtcgcagcggatgatcaccactttctgtgctaacatcagtgcttctggaacccaatcttggacggccctctcggattcaacccaggacactatcagggttacaactcggaagaacactgagcccggacagcccagcggtgtcatcctcaccgctgtctccacaagctggcttccttttacccatcagcaggtgtttgagcttcttgcagatgaacaacagcgctgccagcttgagattttgtcaaacggcggctcccttcatgaggtggcacatattgcaaatggatcacatccaaggaattgcatctctcttcttcgcattaacgctgcaagcaactcgtcacagaatgtggagctcctgctgcaggagagcagcacccaccctgatggtgggagcctggtggtgttcgcgacggtggacgtggacgcaattcaggtgacgatgagcggcgaggatccttcctacatccctctcctccccctgggcttcgccatcttccctgccaccagcccatcacctgctgctgcacccaccatcagctcaagcaccaccaccaccactggcaatggcaatggcgaaaccagtagcactcctccaagaaacagcagcagcaacaacaacaatgcagatgagctgctgcctcccaatggctgcctcctcaccgtcggcatgcaggtgctggccagcgccgtaccttctgccaagctcaacctctcgagtgtcactgcgatcaacagccatgtctgcaacgccattcaccagatcacagctgcactcaaaagttcagcaggtggtgctgggggtgagccggcgtccgatcagtag

SEQ ID NO: 483 - protein, 882 aa, Oryza sativa
MRRMFGDCQVLSSMAAMAGAASSADALFASPLIPNPALAGFMSSSAAMPFHHFSNAAATLIPKEEGLMGGLHVAKDEGMDLEMDMELSGGSGSAHLDGLLSFADVDDDHKPQHSGHDQPPDAAQPSGAAGGNAKKKRYHRHTAHQIQQMEALFKECPHPDDKQRLKLSQELGLKPRQVKFWFQNRRTQMKAQQDRADNVILRAENENLKSDNFRLQAAIRNVVCPNCGHAAVLADMSYEEQQLRIENARLKDELDRLACIATRYGGGGGRQPVLSTSALSCISAPPPVLMPPLDLDMNVYSRHFAEQAPVMGCGDLIPPPVVPQHDGAAAYMGAMMAPVQEQDKQLVVDLAATAADQLARMCRAGEPLWVRQRGAEVMAVEEHARMFSWPVDGAKQGDGGAVARAEGTRDNAVVIMNSINLVDAFLDANKWMELFPSIVCKARTIQIINHGAASGHLGSGTLLLMQAEVQFLSPLVAAREVVFFRYCVHNADEGSWAIVDFPAEGFEEGLLQASVVRCRRRPSGCIIQDMPNGYSRVVWVEHMEMVGEEKPLQPVFRDYVASGAAFGATRWLSILQRQCERLASELARNIADLGVIRTPEARTNMMKLSQRMITTFCANISASGTQSWTALSDSTQDTIRVTTRKNTEPGQPSGVILTAVSTSWLPFTHQQVFELLADEQQRCQLEILSNGGSLHEVAHIANGSHPRNCISLLRINAASNSSQNVELLLQESSTHPDGGSLVVFATVDVDAIQVTMSGEDPSYIPLLPLGFAIFPATSPSPAAAPTISSSTTTTTGNGNGETSSTPPRNSSSNNNNADELLPPNGCLLTVGMQVLASAVPSAKLNLSSVTAINSHVCNAIHQITAALKSSAGGAGGEPASDQ

SEQ ID NO: 484 - DNA, 2355 bp, Oryza sativa
atgatgatcccggcgaggcatatgccgtcgatgatcggccggaacggcgcagcgtacggatcctcatcggcactgtcactcagccagccaaacttgctggataatcaccagttccagcaagcgttccagcatcagcagcagcagcatcatctccttgaccagatcccggcgacgacggcggagagcggcgacaacatgatccgcagccgtgcgtccgaccctctcggcggcgacgagttcgagagcaagtccggcagcgagaacgtcgacggcgtctccgtcgacgaccaggaccccaaccagcggccgcgcaagaagcgctaccaccgccacacccagcatcagatccaggagatggaagcattcttcaaggaatgtccacacccagatgataagcagcgcaaggagctgagccgggagctcggcctggagcctctccaagtgaagttctggttccagaacaagcgcacccaaatgaagaaccagcatgagaggcacgagaactcgcagctgcggtcggataacgagaagctccgggccgagaacatgcggtacaaggaggccctgagcagcgcctcctgccccaattgcggcggccccgccgccctcggcgagatgtccttcgacgagcaccacctccgcatcgagaacgcccgcctccgcgaagagatcgataggatatcggcgatcgcggcgaagtacgtggggaagccaatggtgccgttcccggtgctgtcgaacccgatggcggcggcggcgtcgcgggcgccgctggacctccccgtggcgccgtacggcgtgccgggcgacatgttcggcggcggtggcgccggggagctgctgcgcggggtgcagtcggaggtcgacaagccgatgatcgtggagctcgccgtggcggcgatggaggagctggtccgcatggcgcagctggacgagccgctctggagcgtcgcgccgccgctcgacgccacggcggcggcgatggagacgctcagcgaggaggagtacgcgcgcatgttcccccgagggctcggccccaagcagtacgggctcaggtcggaggcgtcccgcgacagcgccgtcgtcatcatgacgcacgccaacctcgtcgagatcctcatggacgcgaatcagtacgcggcagtgttctcgaacatcgtgtcgagggccatcacgctggaggtgctgtccaccggcgtcgcggggaactacaacggtgcattgcaagtgatgtcagtggagtttcaggtgccatcgccactggtgccaacgagagagagctacttcgtgagatactgcaagcagaacgcagacgggacatgggccgtcgtcgacgtctcgctggacagcctccgccctagccccgtcctcaaatgtcgccgccgtccgtcaggctgcctcatccaagaaatgcccaatggctactccaaggtgacgtgggtggagcatgtggaggtggacgacaggtcggtgcacaacatctacaagctgctggtgaactccgggctggcgttcggcgcgcggcggtgggtcggcacgctggaccgccagtgcgagcgcctcgccagcgtcatggccagcaacatccccaccagcgacatcggcgtgattacgagctcggaggggaggaagagcatgctgaagctggcggagaggatggtggtgagcttctgcggcggcgtgacggcgtcggtggcgcatcagtggacgacgctgtccggcagcggcgccgaggacgtccgcgtcatgacgaggaagagcgtcgacgaccccgggaggccccccggcatcgtcctcaacgccgccacctccttctggctccccgtccctcccaagcgcgtcttcgacttcctccgcgacgaatcctctcgcagtgagtgggacatcctctccaatggcggtatcgttcaagaaatggcccacatcgccaatggccgggatcagggcaactgcgtctcacttcttcgcgtcaacagctcgaactcgaaccagagcaacatgctgatcctgcaggagagctgcacggacgcgtcggggtcgtacgtcatctacgcgccggtggacgtggttgcgatgaacgtcgtgctaaacggcggcgacccggactacgtcgcgctgctgccatcgggcttcgccatcctgcccgatgggccggcgcacgacggtggcgacggcgacggcggcgtcggcgtcggctccggcgggtcgctgctgacggtggcgttccagatactggtggactccgtcccgacggcgaagctctcgctggggtcggtggcgacggtgaacagcctcatcgcctgcacggtggagcgcatcaaggcggccgtctccggcgagagcaatccgcagtag

SEQ ID NO: 485 - protein, 784 aa, Oryza sativa
MMIPARHMPSMIGRNGAAYGSSSALSLSQPNLLDNHQFQQAFQHQQQQHHLLDQIPATTAESGDNMIRSRASDPLGGDEFESKSGSENVDGVSVDDQDPNQRPRKKRYHRHTQHQIQEMEAFFKECPHPDDKQRKELSRELGLEPLQVKFWFQNKRTQMKNQHERHENSQLRSDNEKLRAENMRYKEALSSASCPNCGGPAALGEMSFDEHHLRIENARLREEIDRISAIAAKYVGKPMVPFPVLSNPMAAAASRAPLDLPVAPYGVPGDMFGGGGAGELLRGVQSEVDKPMIVELAVAAMEELVRMAQLDEPLWSVAPPLDATAAAMETLSEEEYARMFPRGLGPKQYGLRSEASRDSAVVIMTHANLVEILMDANQYAAVFSNIVSRAITLEVLSTGVAGNYNGALQVMSVEFQVPSPLVPTRESYFVRYCKQNADGTWAVVDVSLDSLRPSPVLKCRRRPSGCLIQEMPNGYSKVTWVEHVEVDDRSVHNIYKLLVNSGLAFGARRWVGTLDRQCERLASVMASNIPTSDIGVITSSEGRKSMLKLAERMVVSFCGGVTASVAHQWTTLSGSGAEDVRVMTRKSVDDPGRPPGIVLNAATSFWLPVPPKRVFDFLRDESSRSEWDILSNGGIVQEMAHIANGRDQGNCVSLLRVNSSNSNQSNMLILQESCTDASGSYVIYAPVDVVAMNVVLNGGDPDYVALLPSGFAILPDGPAHDGGDGDGGVGVGSGGSLLTVAFQILVDSVPTAKLSLGSVATVNSLIACTVERIKAAVSGESNPQ

SEQ ID NO: 486 - DNA, 2094 bp, Oryza sativa
atggatttcggcgacgaacccgagggctccgacagccagcgccgccgcaagcgctaccaccgccacacgcctcgccagattcagcagctcgaggcgatgttcaaggagtgcccccacccggacgagaaccagcgggcgcagcttagccgggagctcgggttggagccgaggcagatcaagttctggttccagaatcgccggacccagatgaaggcgcagcacgagcgggcggacaactgcttcctccgcgccgagaacgacaagatccggtgcgagaacatcgccatccgcgaggccctcaagaacgtcatctgccccacctgcggcggccctcccgtcggcgaggactacttcgacgagcagaagcttcgcatggagaacgcccgcctcaaggaagagctggaccgcgtgtcgaacctgacgtcgaagtatctcggccggccgttcacgcagctgccgccggcgacgccgccgatgacggtgtcgtcgctggacctgtccgtgggcgggatgggcgggccgtcgctggacctggacctcctcagcggtggctcgtcggggatcccgttccagctgccggcgcccgtgtccgacatggagcggcccatgatggccgagatggccacgcgcgccatggacgagctgatccgcctcgcgcaggccggcgaccacatctggtccaagagccccggcggcggcgtgtccggcggcgacgcccgcgagaccctcaacgtcgacacctacgacagcatcttctccaagcccggcggctcgtaccgcgcccccagcatcaacgtcgaggggtcccgcgagtccggcctcgtgctcatgagcgccgtcgccctcgccgacgtgttcatggacacgaacaagtggatggagttcttcccaagcatcgtgtccaaagctcacaccattgatgtgctcgtgaatggcatgggagggagaagcgagtccttgattctgatgtacgaggagctgcacatcatgacgccggccgtcccgacccgggaggtgaacttcgtccgctactgccggcagatcgagcaggggctatgggccatcgccgacgtctccgtcgacctgcagcgcgacgcccacttcggcgcgccgccgccgcgctcccgccggctcccttcggggtgcctcatcgctgacatggccaatggctactccaaggtatacgcgatggacaatgtgccgcacgcaatggtgttttggtttcggctcgctgacgacgtcgcgcacgctcgcgtggaggagaagagcccgatcaacgtgctgtaccgtgacctcgtgctgagcggcgccgcgttcggggcgcaccgctggctcgccgcgctccagcgcgcgtgcgagcgctacgcctccctcgtcgcgctcggcgtcccgcaccacatcgccggtgtgacgccggaggggaagaggagcatgatgaagctgtcgcagcggatggtgaacagcttctgctcgagcctgggggcgtcgcagatgcaccagtggacgacgctgtcgggctccaacgaggtgagcgtccgcgtcaccatgcaccggagcacggaccccggccagcccaacggcgtcgtcctcagcgccgccacctccatctggctccccgtcccctgcgaccacgtcttcgccttcgtccgcgacgagaacacccgctcccagggcttgaatgcgagccagaacagcatgctgatactgcaggagagctgcacggacgcgtcggggtcgctggtggtgtactcgccgatcgacatcccggcggcgaacgtcgtgatgagcggtgaggacccgtcgagcatcccgctgctgccgtcggggttcaccatcctccccgatggccgcccgggctcggcggcgggggcgtcgaccagcagcgcggggccgctcgccgccgcgcgcggcgggggcggcgggggcgctggcggcgggtccgtcgtcaccgtcgcgttccagatcctcgtcagcagcctgccgtcgtcgaagctcaacgccgagtctgtcgccaccgtcaacgggctgatcaccaccaccgtcgagcagatcaaggccgcgctcaactgctccgcccatggccaccacccctga

SEQ ID NO: 487 - protein, 697 aa, Oryza sativa
MDFGDEPEGSDSQRRRKRYHRHTPRQIQQLEAMFKECPHPDENQRAQLSRELGLEPRQIKFWFQNRRTQMKAQHERADNCFLRAENDKIRCENIAIREALKNVICPTCGGPPVGEDYFDEQKLRMENARLKEELDRVSNLTSKYLGRPFTQLPPATPPMTVSSLDLSVGGMGGPSLDLDLLSGGSSGIPFQLPAPVSDMERPMMAEMATRAMDELIRLAQAGDHIWSKSPGGGVSGGDARETLNVDTYDSIFSKPGGSYRAPSINVEGSRESGLVLMSAVALADVFMDTNKWMEFFPSIVSKAHTIDVLVNGMGGRSESLILMYEELHIMTPAVPTREVNFVRYCRQIEQGLWAIADVSVDLQRDAHFGAPPPRSRRLPSGCLIADMANGYSKVYAMDNVPHAMVFWFRLADDVAHARVEEKSPINVLYRDLVLSGAAFGAHRWLAALQRACERYASLVALGVPHHIAGVTPEGKRSMMKLSQRMVNSFCSSLGASQMHQWTTLSGSNEVSVRVTMHRSTDPGQPNGVVLSAATSIWLPVPCDHVFAFVRDENTRSQGLNASQNSMLILQESCTDASGSLVVYSPIDIPAANVVMSGEDPSSIPLLPSGFTILPDGRPGSAAGASTSSAGPLAAARGGGGGGAGGGSVVTVAFQILVSSLPSSKLNAESVATVNGLITTTVEQIKAALNCSAHGHHP

SEQ ID NO: 488 - DNA, 2451 bp, Oryza sativa
atggggaccaaccggccgcggccacgaaccaaggacttcttcgcagctccggcgctctccctcacactggcaggcgtgttcggccggaaaaatggacctgcggcgtcgggtggagacggggtggaggaaggcgacgaggaggtgcaggctgcaggcgaggcggcggtggagatcagcagcgagaacgcggggccggggtgtagacagtcccagtccggcggtggctccggggaagacggcggccatgacgacgacgacggagagggtagtaataagaagaggaggaggaagaactaccacaggcacaccgccgaacaaatcaggatcatggaagcgctattcaaagagtccccacatccggatgagaggcagcggcagcaggtcagtaagcagctcggcctctctgcacgccaggtcaagttctggtttcagaaccgacgaactcagatcaaggcggttcaggagcgacacgagaactcgctgctcaagtccgagctggagaagctccaggacgagcaccgcgcgatgagagagctcgccaagaagccatctcgctgcctaaactgcggcgtcgtggcaacctccagcgacgccgccgccgccgccacggcggcggacacccgtgaacagcggctgcgactcgagaaagccaagctcaaagctgaggtttgtatgccgccgccgcgaagccgcgcccgtcctttccggtgcgctacactgcaagacactgactccggcgaactggcgatgttgaacttgtttcagatagagaggctgcgagggacgccaggaaagtccgccgccgatggaatcgcctcgccgccgtgctccgcgtccgcgggcgccatgcagacgaacagcaggagcccgccgttgcacgaccacgacggcggcttcttacgccacgacgacgacaagccgaggatcttggagctggccacccgtgcgctggacgagctggttgggatgtgctcctccggcgagcctgtgtgggtgcggggcgtcgagaccggcagggacattctgaactacgacgagtacgtgcgcttgttccgccgcgaccacggtggttccggcgatcagatggccggctggacggttgaggcttccagggaatgtggactagtttaccttgacacgatgcatcttgtgcacactttcatggacgtggacaagtggaaggacctattccctaccatgatctcaaaggcagcgacgctggaaatgatcagcaaccgcgaagacgatggccgagacggcgtcctgcaactgatgtatgcagagcttcagacactgacaccaatggtgcccacgagggagttatacttcgcccgctactgcaagaagctggccgcggagagatgggcgatcgtcgacgtgtccttcgacgagtctgagactggcgtccacgcgtcgtcggcggtcaggtgctggaagaacccatccggctgcctcatcgaagagcagaacaacggccggtgcaagatgacctgggtggagcacaccagatgccgccggtgcacggtcgcgccgttgtaccgggcggtcaccgcgagcggcgtggcgttcggcgcgagacgctgggtggccgcgctccagctccagtgcgagaggatggtcttcgccgtggcgaccaacgttccaacgagggactcgaccggggtctccacgctcgcgggcaggaggagcgttctgaaactggcgcaccggatgacgtcgagcctctgccgcaccaccggtggatcgtgtgacatggcgtggcgcagggcgccgaaaggaggcagcggcggcggtggcgacgacgacatctggctgacgtcccgggagaacgccggcgacgaccctggcgagccgcaggggctgatcgcgtgcgccgcggcgtcgacgtggctgccggtgaatccgacggctctcctcgacttactgagggatgaatcacggcgaccagagtgggacgtgatgctacccggaaaatctgttcagagccgcgtgaatcttgcaaaggggaaggaccgtaccaactgcgtcaccgcctacgccgctcgaccggaagaagaagaagagagaggcggcaagtgggtcctccaggacgtctgcaccaacccctgcgagtcgacgatcgcgtacgcggcgatcgacgccgccgcgctgcagccggtcatcgccgggcacgactcgagcggcgtgcacctcctgccgtgcggattcatctcggtgatgccggacgggctcgagtccaagccggcggtgatcacggcgtcgaggaggggaggcgaggcttcgggggccggatcgctggttaccgtggcgttccaggtcccggccagcccgtcggcggcggcggccacgctctcgccggactcggtggaggccgtgacggtcctggtctcctccactctgcgtaacatcaggaaagccttggggtgcgactcgtgcgaggaggaattctag

SEQ ID NO: 489 - protein, 816 aa, Oryza sativa
MGTNRPRPRTKDFFAAPALSLTLAGVFGRKNGPAASGGDGVEEGDEEVQAAGEAAVEISSENAGPGCRQSQSGGGSGEDGGHDDDDGEGSNKKRRRKNYHRHTAEQIRIMEALFKESPHPDERQRQQVSKQLGLSARQVKFWFQNRRTQIKAVQERHENSLLKSELEKLQDEHRAMRELAKKPSRCLNCGVVATSSDAAAAATAADTREQRLRLEKAKLKAEVCMPPPRSRARPFRCATLQDTDSGELAMLNLFQIERLRGTPGKSAADGIASPPCSASAGAMQTNSRSPPLHDHDGGFLRHDDDKPRILELATRALDELVGMCSSGEPVWVRGVETGRDILNYDEYVRLFRRDHGGSGDQMAGWTVEASRECGLVYLDTMHLVHTFMDVDKWKDLFPTMISKAATLEMISNREDDGRDGVLQLMYAELQTLTPMVPTRELYFARYCKKLAAERWAIVDVSFDESETGVHASSAVRCWKNPSGCLIEEQNNGRCKMTWVEHTRCRRCTVAPLYRAVTASGVAFGARRWVAALQLQCERMVFAVATNVPTRDSTGVSTLAGRRSVLKLAHRMTSSLCRTTGGSCDMAWRRAPKGGSGGGGDDDIWLTSRENAGDDPGEPQGLIACAAASTWLPVNPTALLDLLRDESRRPEWDVMLPGKSVQSRVNLAKGKDRTNCVTAYAARPEEEEERGGKWVLQDVCTNPCESTIAYAAIDAAALQPVIAGHDSSGVHLLPCGFISVMPDGLESKPAVITASRRGGEASGAGSLVTVAFQVPASPSAAAATLSPDSVEAVTVLVSSTLRNIRKALGCDSCEEEF

SEQ ID NO: 490 - DNA, 2346 bp, Oryza sativa
atggagaggagggagattttccaagttgctgatcttgcacacatattgagagggaaacctgtagatcatcttcaacagccaaacttgctggataatcaccagttccagcaagcgttccagcatcagcagcagcagcatcatctccttgaccagatcccggcgacgacggcggagagcggcgacaacatgatccgcagccgtgcgtccgaccctctcggcggcgacgagttcgagagcaagtccggcagcgagaacgtcgacggcgtctccgtcgacgaccaggaccccaaccagcggccgcgcaagaagcgctaccaccgccacacccagcatcagatccaggagatggaagcattcttcaaggaatgtccacacccagatgataagcagcgcaaggagctgagccgggagctcggcctggagcctctccaagtgaagttctggttccagaacaagcgcacccaaatgaagaaccagcatgagaggcacgagaactcgcagctgcggtcggataacgagaagctccgggccgagaacatgcggtacaaggaggccctgagcagcgcctcctgccccaattgcggcggccccgccgccctcggcgagatgtccttcgacgagcaccacctccgcatcgagaacgcccgcctccgcgaagagatcgataggatatcggcgatcgcggcgaagtacgtggggaagccaatggtgccgttcccggtgctgtcgaacccgatggcggcggcggcgtcgcgggcgccgctggacctccccgtggcgccgtacggcgtgccgggcgacatgttcggcggcggtggcgccggggagctgctgcgcggggtgcagtcggaggtcgacaagccgatgatcgtggagctcgccgtggcggcgatggaggagctggtccgcatggcgcagctggacgagccgctctggagcgtcgcgccgccgctcgacgccacggcggcggcgatggagacgctcagcgaggaggagtacgcgcgcatgttcccccgagggctcggccccaagcagtacgggctcaggtcggaggcgtcccgcgacagcgccgtcgtcatcatgacgcacgccaacctcgtcgagatcctcatggacgcgaatcagtacgcggcagtgttctcgaacatcgtgtcgagggccatcacgctggaggtgctgtccaccggcgtcgcggggaactacaacggtgcattgcaagtgatgtcagtggagtttcaggtgccatcgccactggtgccaacgagagagagctacttcgtgagatactgcaagcagaacgcagacgggacatgggccgtcgtcgacgtctcgctggacagcctccgccctagccccgtcctcaaatgtcgccgccgtccgtcaggctgcctcatccaagaaatgcccaatggctactccaaggtgacgtgggtggagcatgtggaggtggacgacaggtcggtgcacaacatctacaagctgctggtgaactccgggctggcgttcggcgcgcggcggtgggtcggcacgctggaccgccagtgcgagcgcctcgccagcgtcatggccagcaacatccccaccagcgacatcggcgtgattacgagctcggaggggaggaagagcatgctgaagctggcggagaggatggtggtgagcttctgcggcggcgtgacggcgtcggtggcgcatcagtggacgacgctgtccggcagcggcgccgaggacgtccgcgtcatgacgaggaagagcgtcgacgaccccgggaggccccccggcatcgtcctcaacgccgccacctccttctggctccccgtccctcccaagcgcgtcttcgacttcctccgcgacgaatcctctcgcagtgagtgggacatcctctccaatggcggtatcgttcaagaaatggcccacatcgccaatggccgggatcagggcaactgcgtctcacttcttcgcgtcaacagctcgaactcgaaccagagcaacatgctgatcctgcaggagagctgcacggacgcgtcggggtcgtacgtcatctacgcgccggtggacgtggttgcgatgaacgtcgtgctaaacggcggcgacccggactacgtcgcgctgctgccatcgggcttcgccatcctgcccgatgggccggcgcacgacggtggcgacggcgacggcggcgtcggcgtcggctccggcgggtcgctgctgacggtggcgttccagatactggtggactccgtcccgacggcgaagctctcgctggggtcggtggcgacggtgaacagcctcatcgcctgcacggtggagcgcatcaaggcggccgtctccggcgagagcaatccgcagtag

SEQ ID NO: 491 - protein, 781 aa, Oryza sativa
MERREIFQVADLAHILRGKPVDHLQQPNLLDNHQFQQAFQHQQQQHHLLDQIPATTAESGDNMIRSRASDPLGGDEFESKSGSENVDGVSVDDQDPNQRPRKKRYHRHTQHQIQEMEAFFKECPHPDDKQRKELSRELGLEPLQVKFWFQNKRTQMKNQHERHENSQLRSDNEKLRAENMRYKEALSSASCPNCGGPAALGEMSFDEHHLRIENARLREEIDRISAIAAKYVGKPMVPFPVLSNPMAAAASRAPLDLPVAPYGVPGDMFGGGGAGELLRGVQSEVDKPMIVELAVAAMEELVRMAQLDEPLWSVAPPLDATAAAMETLSEEEYARMFPRGLGPKQYGLRSEASRDSAVVIMTHANLVEILMDANQYAAVFSNIVSRAITLEVLSTGVAGNYNGALQVMSVEFQVPSPLVPTRESYFVRYCKQNADGTWAVVDVSLDSLRPSPVLKCRRRPSGCLIQEMPNGYSKVTWVEHVEVDDRSVHNIYKLLVNSGLAFGARRWVGTLDRQCERLASVMASNIPTSDIGVITSSEGRKSMLKLAERMVVSFCGGVTASVAHQWTTLSGSGAEDVRVMTRKSVDDPGRPPGIVLNAATSFWLPVPPKRVFDFLRDESSRSEWDILSNGGIVQEMAHIANGRDQGNCVSLLRVNSSNSNQSNMLILQESCTDASGSYVIYAPVDVVAMNVVLNGGDPDYVALLPSGFAILPDGPAHDGGDGDGGVGVGSGGSLLTVAFQILVDSVPTAKLSLGSVATVNSLIACTVERIKAAVSGESNPQ

SEQ ID NO: 492 - DNA, 2421 bp, Oryza sativa
atgcagttcccgttctccggcgctggcccgggcgtcttcacgtcatcgccggcgctctccctcgcgctggcggacgcggtggcaggccggaacagcggcggcggtgggaagatggttaccgcggcccatggcggcgtcggcggaggaggaggaggaggacgcgcgaaggcgagggacgcgttggaggtggagaacgagatgagccggtccgggagcgaccacctcgacgtcgtctcttgcggcgacgcgggcggcggcggcggcgacgacgacgatgacgaggacgccgagcacggcaacccgcccaagcgcaagaagcggtaccaccgccacacgccgcagcagatccaagagctggaagcgatgttcaaggaatgcccccacccagacgagaagcagcgcgccgagctgagcaagcggctcggcctcgaaccccggcaggtcaagttctggttccagaatcggcgaacgcagatgaagatgcaactggagcgacacgagaactcgctgctgaagcaggagaacgataagctgcggtccgagaacctgtcaatccgggaggccacgagcaacgcggtgtgcgttggctgcggcggcccggcgatgctcggggaggtgtccctggaggagcaccaccttcgcgtcgagaacgcgaggctcaaggacgagctcagccgagtgtgcgcgctcgccgccaagttccttggcaagtccatctctgtcatggcgccaccgcagatgcatcagcctcatcctgtgccaggctcgtcgctggagcttgcggttgggggtatcggttcgatgccatcagccacgatgcccatctcgacgatcactgattttgctggcgccatgtccagttcaatgggcacggtgatcacgcccatgaagtctgaggctgaaccatcggcaatggctggcattgacaagtccttgttcttggagctagcaatgagtgcaatggatgagctagtcaagatggctcagatgggggatccgctatggattccaggtgcctccgtaccttcctcgccggcaaaggagagtctaaacttcgaggagtacctaaacaccttcccaccttgcatcggggtgaagcctgaagggtatgtatcagaggcatctagagaatctggcattgtcatcattgacgatggcgccgcgcttgtggagaccctcatggatgagcgacggtggtccgatatgttctcatgcatgattgccaaggcatcaaccactgaggagatttctactggtgttgctgggagtagaaatggtgcattgcttcttatgcaggcagagctacaggtgctttctcctcttgtgcctattagagaggtgaagtttctcaggttctccaaacagctggctgatggtgtatgggctgtagtggacgtttcggctgatgaattgatgagggatcagggcattacttctgcatcctcgactgcaaacatgaactgccgaaggctgccttctggttgtgtgctgcaggacactccaaatgggtttgttaaggtcacatgggttgaacatacagaatatgatgaggcatctgtgcacccgctctaccggcctcttctccggtctggtcttgcccttggtgcagggcgatggatcgcgacattacagcggcagtgcgaatgcttggcccttctcatgtcttctattgcattgccagagaacgactcatcagctatccatcctgaaggtaaacggagcatgttgaagttggcaaggaggatgacggacaacttctgtgcaggggtgagcacatcatctacccgtgaatggagcaaactggttggattgacaggcaacattggggaggatgtgcatgtaatggcgcggaagagtgtggatgaacctggaacgccgccaggtgtggtgcttagtgctgctacatctgtgtggatgcctgtgatgcctgaacggctcttcaacttcttgcacaacaaggggctgcgtgctgaatgggatatcctcagcaatggtggccctatgcaggaggtgacaagcattgccaaggggcaacagaatggcaataccgtatgtctactgaaggctagtcccaccaaagacaagcagaacagcatgctgatcctacaggagacgtgtgcagacgcatccggttcaatggttgtgtatgctcctgtagacatcccagcaatgcaccttgtcatgagtggtggggattcgtcatgcgtcgcccttcttccatcaggttttgccatcctgcctgctgggcctagcatcggcgcagatcacaagatgggcggttcattgctcaccgttgcattccagatacttgccaacagccagcccagtgctaagctcacggtggagtcagtcgagaccgtgagcaaccttatctcctgcaccatcaagaagatcaagacggcgctgcattgcgacgtgtga

SEQ ID NO: 493 - protein, 806 aa, Oryza sativa
MQFPFSGAGPGVFTSSPALSLALADAVAGRNSGGGGKMVTAAHGGVGGGGGGGRAKARDALEVENEMSRSGSDHLDVVSCGDAGGGGGDDDDDEDAEHGNPPKRKKRYHRHTPQQIQELEAMFKECPHPDEKQRAELSKRLGLEPRQVKFWFQNRRTQMKMQLERHENSLLKQENDKLRSENLSIREATSNAVCVGCGGPAMLGEVSLEEHHLRVENARLKDELSRVCALAAKFLGKSISVMAPPQMHQPHPVPGSSLELAVGGIGSMPSATMPISTITDFAGAMSSSMGTVITPMKSEAEPSAMAGIDKSLFLELAMSAMDELVKMAQMGDPLWIPGASVPSSPAKESLNFEEYLNTFPPCIGVKPEGYVSEASRESGIVIIDDGAALVETLMDERRWSDMFSCMIAKASTTEEISTGVAGSRNGALLLMQAELQVLSPLVPIREVKFLRFSKQLADGVWAVVDVSADELMRDQGITSASSTANMNCRRLPSGCVLQDTPNGFVKVTWVEHTEYDEASVHPLYRPLLRSGLALGAGRWIATLQRQCECLALLMSSIALPENDSSAIHPEGKRSMLKLARRMTDNFCAGVSTSSTREWSKLVGLTGNIGEDVHVMARKSVDEPGTPPGVVLSAATSVWMPVMPERLFNFLHNKGLRAEWDILSNGGPMQEVTSIAKGQQNGNTVCLLKASPTKDKQNSMLILQETCADASGSMVVYAPVDIPAMHLVMSGGDSSCVALLPSGFAILPAGPSIGADHKMGGSLLTVAFQILANSQPSAKLTVESVETVSNLISCTIKKIKTALHCDV

SEQ ID NO: 494 - DNA, 2355 bp, Oryza sativa
atgaacggcgagcttaaacttatggcttcctatgtgagcaagcttaagttcatcttgcaaaaagatcagcagcaggagccccatactgcgaaccttctagtcctacttgggagtagcaatcaggacaaaagaaatggcctctcacagggagaaaacagaatggacacttgtaccagaaagaagccaagaagataccaactcctcaccatgcaacaaaaagaaacgcttaatcgtgcatttcaatcatgtccgaaccctgatagaaatgacttgaagaagttggccaaggaactaaacatgactgagacccaaatcaaatattggttccagaactgcaggacaaagatgaagaaattcaagaacaatgaggagcgcaaactactgcagaaggagaatgaggagctaaagaaggagaatgcagagttgagaaataggatgaagaactcaacatgccgcgcttgtgacctccctttgttccatatagattgccgtcattgggagaatccaatgctcaacaagggtaatcatggcgttacaagtaatctcattcctcaggcagtgtcatccttgctccccagctcaagtggttttgtagcttcaggctccaatcttagtagcaatgctgtgctcatgcccgtatctgccatgccatcatcagttttgcagcctgctccagccgtctctggtgccaattttcccatcttgcacaatctatctgccaatgcaaatgatggctatacggaaaaaaacgtacttcttgatctggcgaaccgtgcaatggaagagttctttagtctaatgaaggagaatgagtctcttcttgtcaaaaaaaaggagaatgggcctctctggctcccacacatggatattctgggagtcgaatcacttaactaccaggaataccttgcaaaatccaggacgattggacaaaaacctgttgacttcaaagtggtcgtcaccagggacactgccattgtcaatggtagctgtgttgacctcgtcaaaagccttttggatgctaaccgctggagagagttgtttccaggcatcgtggcaagtgcaaacaccaccaagatcatctctactgggccctctaacttgcacgacgggttgcttcaattgatgcgtgcagagctccaggtaatgtcacctgaagtcccagtttgcgatgtgacattcttgaggcagagtgtgcagtttggaagtggactgtggtgtgtggttgatgtgtctattgataccatccttcctggagagagtaaaacagctcagtccagtgtgcagaccagcagtacagctgccagacgcatggaagtcaggctgttgccatcaggctgtgttattgaagaaatggagaatggctattccaaggtgacctggatggtgcatgcagcttatgatgagagagcagtgccagtgctttatcattcacttctccgctctgcaaaagcccttggtgcgtgccgctgggtagcatcactccagagacacagccagttcctttccggcctgcacaaatacatcttttgtcctgacagcacaaaagtggtgatgcgaagaaaagtcctgtacctggtgaagcagatgacgagcagcttcacaggcctatttgcgtcgatgtctaaggccacgctgcaagatggtgatgatactcacttcgcgcatcagatagttggtggtgcaacaggtgaacctgccggactgctgctgagcgccaccacaaccatatggctccccggcgtgaacccgaggcacgtgtatgaccacctgcgtgatgagcagtgccatggtgaatggcgctgcctcctcggtgagcagctgcatcagggcaatgccttgccgtatggtgcccccctgaatggtgagaccgtgccagagttctatcgcatggtgaacgggctgcatgaagggcatgctatctccctgatcagccccagagaaatgggtggtaacataagcaacactctgctcctgcaagaggcaagaactgatctttctggctccctcatagtttacgccaggacagatgtgaacaccgtgcattccatcatgaacagtggcctcaaccctgccaccgtcttcctcgtatcctctggatgtgccattcttcctgattgcctggaatcattccctctacacccagctgcaactgcagatcaggccggcacctccagtgccgctatcgctagcaggagcgaaaccggtgggtcattcgtcaccgtcacttaccagatgtttttcagcagccaaggtggcgcagcacctgccagctcatcaattcatcaaggccgtgatgcgctcaagaaagccaccgacattttcaaggtggtcctcgacactctcaccgtggcatag

SEQ ID NO: 495 - protein, 784 aa, Oryza sativa
MNGELKLMASYVSKLKFILQKDQQQEPHTANLLVLLGSSNQDKRNGLSQGENRMDTCTRKKPRRYQLLTMQQKETLNRAFQSCPNPDRNDLKKLAKELNMTETQIKYWFQNCRTKMKKFKNNEERKLLQKENEELKKENAELRNRMKNSTCRACDLPLFHIDCRHWENPMLNKGNHGVTSNLIPQAVSSLLPSSSGFVASGSNLSSNAVLMPVSAMPSSVLQPAPAVSGANFPILHNLSANANDGYTEKNVLLDLANRAMEEFFSLMKENESLLVKKKENGPLWLPHMDILGVESLNYQEYLAKSRTIGQKPVDFKVVVTRDTAIVNGSCVDLVKSLLDANRWRELFPGIVASANTTKIISTGPSNLHDGLLQLMRAELQVMSPEVPVCDVTFLRQSVQFGSGLWCVVDVSIDTILPGESKTAQSSVQTSSTAARRMEVRLLPSGCVIEEMENGYSKVTWMVHAAYDERAVPVLYHSLLRSAKALGACRWVASLQRHSQFLSGLHKYIFCPDSTKVVMRRKVLYLVKQMTSSFTGLFASMSKATLQDGDDTHFAHQIVGGATGEPAGLLLSATTTIWLPGVNPRHVYDHLRDEQCHGEWRCLLGEQLHQGNALPYGAPLNGETVPEFYRMVNGLHEGHAISLISPREMGGNISNTLLLQEARTDLSGSLIVYARTDVNTVHSIMNSGLNPATVFLVSSGCAILPDCLESFPLHPAATADQAGTSSAAIASRSETGGSFVTVTYQMFFSSQGGAAPASSSIHQGRDALKKATDIFKVVLDTLTVA

SEQ ID NO: 496 - DNA, 2619 bp, Oryza sativa
atgagcttcggtggcatgttcgatggcgccggctccggcgtcttctcctacgacgccggcggcggcggcggcggcggcggagtacacaactcccgcctcctccctacgccgcccgtccccaagcccggcggcgggttcgccgctcccggcctctctctcggcctgcaaactatggacggtagccagctcggcgacgtgaaccggtcgcttgccatgatgggcaacggcgggagcggcagcggcggcgacggcgactcgctgggacgcggccgggaggaagagaacgacagccgctccggcagcgacaacctggacggcgcctccggcgacgaactcgacccggacaacagcaacccgcgcaagaagaagaagcgttatcaccgccacaccccgcagcaaatccaagaactcgaagccgtgttcaaggagtgtccacatcctgacgagaagcaacggatggagctcagccggcggctcaacctcgagagccgccaggtcaagttctggttccagaatcgccgcacccagatgaagcagacgcagatcgagcggcatgagaacgcgctgctgcggcaggagaacgacaagctgagggcggagaacatgacgatccgggaggcgatgaggaacccgatgtgcgcgagctgcggcggcgcggcggtgctcggcgaggtgtcgctggaggagcagcacctgcgcatcgagaacgcgcggctcaaggacgagctcgaccgcgtctgcgcgctcgccggcaagttcctcggccggccaatctcgagcatctcctccccgggcccgccgtcgctgcaggcgtgctccggcctcgagctcggcgtcggcagcaacggcgggttcgggctcggcgcgctcggggcctcggcggcgatgcagtccatccccgacctgatgggcggctcctccggcctgacgggggggcccgtgggctccgccgccatgcgcctacccgcgggcattggcggcctcgacggcgccatgcacgccgcggcggccgacggcggcgccatcgaccgcgccgtgctcctggagctcgccctcgcggccatggacgagctcgtcaaggtggcgcagatggacgagccgctctggctccccagcctcgacggcgggttcgagacgctcaactacgacgagtaccaccgcgcgttcgccagggtggtcggccagtgccccgccggctacgtctccgaggcgacgcgcgagtccggcatcgccatcatcagcagcgtcgacctcgtcgacagcctcatggacgcgccacggtggtcggagatgttcccgtgcgtggtggcgagagcgagcaccacggacatcatctccagcggcatgggcggcacgcgcagcgggtcaattcaactgatgcacgcggagctgcaggtgctgtcgccgctggtgccgatacgggaggtggtgttcctgcgtttctgcaagcagcacgccgagggcctctgggcggtggtcgacgtctcggtcgacgccgtcctccgccccgaccagaacggcggcggcgggtcgtcgtcgtcgtcgtacatgggctgccgcctcctccccaccggctgcatcgtgcaggacatgaacaatggctactccaaggtcacgtgggtggttcacgcggagtacgacgagacggcggcgcaccagctctaccggccgctgctccgctccggccaggccctcggcgcccgccgctggctcgcctcgctccagcgacagtgccagtatctcgccatcctctgctccaactccctccccgcccgcgaccacgctgcgataacgccggtggggaggaggagcatgctgaagctggcgcagcggatgacggacaacttctgcgcgggggtgtgcgcgtcggcggcgcagaagtggcggcgcctggacgagtggcgcggcgagggtgggggcggcggcggtggcggcggcggggacggggaggacaaggtgcggatgatggcgcggcacagcgtgggcgcgccgggggagccgccgggcgtcgtgctgagcgccaccacgtcggtgcggctccccggcacgctgccgcagcgcgtgttcgactacctccgcgacgagcagcggcgcggcgactgggacatccttgccaacggcgaggccatgcaggagatggaccacatcgccaagggccagcaccacggcaatgccgtctccctcctccgtccaaatgccacaagcgggaaccagaacaacatgctgatcctccaggagacgtgcaccgactcatcgggctccctcgtcgtctacgctccggtggacgtgcagtcgatgcacgtcgtcatgaacggcggcgactccgcctacgtctccctcctcccctccggcttcgccatcctccccgacggccacaacaatggcgcctcgccgtctccggcagaggtcggcagcggcgcctcgccgaactccgccgccggtggcggtggcggtagcaacaacaccgggtcgctggtgacggtggcgttccagatactcgtcaacaacctgccgacggcgaagctcaccgtggagtccgtcgacaccgtcagcaacctcctctcctgcaccatccagaagatcaagtcggcactgcaggccagcatcatctcaccatag

SEQ ID NO: 497 - protein, 872 aa, Oryza sativa
MSFGGMFDGAGSGVFSYDAGGGGGGGGVHNSRLLPTPPVPKPGGGFAAPGLSLGLQTMDGSQLGDVNRSLAMMGNGGSGSGGDGDSLGRGREEENDSRSGSDNLDGASGDELDPDNSNPRKKKKRYHRHTPQQIQELEAVFKECPHPDEKQRMELSRRLNLESRQVKFWFQNRRTQMKQTQIERHENALLRQENDKLRAENMTIREAMRNPMCASCGGAAVLGEVSLEEQHLRIENARLKDELDRVCALAGKFLGRPISSISSPGPPSLQACSGLELGVGSNGGFGLGALGASAAMQSIPDLMGGSSGLTGGPVGSAAMRLPAGIGGLDGAMHAAAADGGAIDRAVLLELALAAMDELVKVAQMDEPLWLPSLDGGFETLNYDEYHRAFARVVGQCPAGYVSEATRESGIAIISSVDLVDSLMDAPRWSEMFPCVVARASTTDIISSGMGGTRSGSIQLMHAELQVLSPLVPIREVVFLRFCKQHAEGLWAVVDVSVDAVLRPDQNGGGGSSSSSYMGCRLLPTGCIVQDMNNGYSKVTWVVHAEYDETAAHQLYRPLLRSGQALGARRWLASLQRQCQYLAILCSNSLPARDHAAITPVGRRSMLKLAQRMTDNFCAGVCASAAQKWRRLDEWRGEGGGGGGGGGGDGEDKVRMMARHSVGAPGEPPGVVLSATTSVRLPGTLPQRVFDYLRDEQRRGDWDILANGEAMQEMDHIAKGQHHGNAVSLLRPNATSGNQNNMLILQETCTDSSGSLVVYAPVDVQSMHVVMNGGDSAYVSLLPSGFAILPDGHNNGASPSPAEVGSGASPNSAAGGGGGSNNTGSLVTVAFQILVNNLPTAKLTVESVDTVSNLLSCTIQKIKSALQASIISP

SEQ ID NO: 498 - DNA, 2250 bp, Oryza sativa
atgcagagcttgttggatggacaccaccatcagctgccatcactgctgcagcagcaccacaatggacaccatctgcttgatcagcaccagcagcatcagcatcagcttcccccacaggcgacgacgacgagcgagagcgacggccgtgcccctcgcgacgagctggagatgagcaagtccggtggcagcgacaacctggagagcggcggtggcggtggcggaggtggctccggtggtgatcaggaccccaaccagcgcccccgcaagaagcgctaccaccgccacacccagcaccagatccaggagctcgaggccttcttcaaggagtgcccccaccctgatgacaagcagcgcaaggagctcagccgcgagctcggcctcgagcccctccaggtcaagttctggttccagaacaagcgcacccagatgaagacgcagcatgagagacacgagaacaatgcgctgcgcgcagagaacgagaagctgcgggcagagaacatgaggtacaaggaggcgcttgccaacgcgtcctgccccaactgcggcggtccggccgccatcggcgagatgtccttcgacgagcaccacctccgcctcgagaacgcgcgcctccgcgacgagattgacaggatctccgccatcgccgccaagtacgtcggcaagcccgccgcggccgtctcggccgcgtacccgccgctgccgccgtcgaacaggtcgccgctcgatcatatgggcattcccggcgctggcgccgacgtgttcggcgccgacttcgacaagccgctcgtcatcgagctcgccgtggccgccatggaggagctcgtcaggatggcgcagctcggcgagccgctctgggcgccggcgctcggcggcgaggcgctcggcgaggaggagtacgcgcgcacgttcccgcgcgggctagggcccaagtcgccggagctccggtcggaggcgtcgagggagacggcggtggtgatcatgaaccacgtcagcctcgtggagatgctcatggacgtcgggcagtggacggcgctcttctcgagcatcgtgtcgcgcgcggcgacgctggaggtgctctcgacgggcgtcgccggcaaccacaacggcgcgctgcagctcatgtccgccgagttccagatgccgtcgccgctggtgccgacgagggagacccagttcctgcgctactgcaagcagcaccccgacggcacgtgggccgtcgtcgacgtctccctcgacgggctccgcgccggcgccgggggcggatgccagccggcggcggcgcgcggccaccggcgccgcccctccggctgcctcatccaggagatgccgaacggctactccaaggtgacgtgggtggagcacgtggaggccgacgaccagatggtgcacaacctgtacaagccggtggtgaactccggcatggcgttcggcgctcgccggtgggtggcgacgctggagcggcagtgcgagcgcctggctagcgccatggcgagcaacgtggcgtcctcgggcgacgccggcgtgatcacgacgtcggaggggaggcggagcatgctgaagctggcggagcggatggtggcgagcttctgcggcggcgtgacggcgtcgacgacgcaccagtggacgacgctctccggcagcggcgccgaggacgtccgcgtcatgacgcgcaagagcgtcgacgaccccggccgccctcccggcatcatcctcaacgccgccacctccttctggctccccgtcccgccttcccgcgtcttcgacttcctccgcgacgactccacccgcagcgagtgggacatcctctccaatggcggcgtcgtccaagaaatggctcacatcgccaatggccgcgaccacggcaacgccgtctccctcctccgcgtcaacaacgcgaactcgaaccagagcaacatgctgatactgcaggagtgctgcacggacgcgacggggtcgtacgtgatatacgcgccggtggacgtggtggcgatgaacgtggtgctcaacggcggcgacccggactacgtggcgctgctgccgtcggggttcgccatcctccccgacgggccggacggcggcggcgggtcgctgctgacggtggcgttccagatactggtcgactccgtgcccaccgccaagctgtcgctcggctccgtcgccaccgtcaacagcctcatcgcctgcaccgtcgagcgcatcaaggccgccatcaccggcgacaacggcgtcgcgccgccatgcccacggtga

SEQ ID NO: 499 - protein, 749 aa, Oryza sativa
MQSLLDGHHHQLPSLLQQHHNGHHLLDQHQQHQHQLPPQATTTSESDGRAPRDELEMSKSGGSDNLESGGGGGGGGSGGDQDPNQRPRKKRYHRHTQHQIQELEAFFKECPHPDDKQRKELSRELGLEPLQVKFWFQNKRTQMKTQHERHENNALRAENEKLRAENMRYKEALANASCPNCGGPAAIGEMSFDEHHLRLENARLRDEIDRISAIAAKYVGKPAAAVSAAYPPLPPSNRSPLDHMGIPGAGADVFGADFDKPLVIELAVAAMEELVRMAQLGEPLWAPALGGEALGEEEYARTFPRGLGPKSPELRSEASRETAVVIMNHVSLVEMLMDVGQWTALFSSIVSRAATLEVLSTGVAGNHNGALQLMSAEFQMPSPLVPTRETQFLRYCKQHPDGTWAVVDVSLDGLRAGAGGGCQPAAARGHRRRPSGCLIQEMPNGYSKVTWVEHVEADDQMVHNLYKPVVNSGMAFGARRWVATLERQCERLASAMASNVASSGDAGVITTSEGRRSMLKLAERMVASFCGGVTASTTHQWTTLSGSGAEDVRVMTRKSVDDPGRPPGIILNAATSFWLPVPPSRVFDFLRDDSTRSEWDILSNGGVVQEMAHIANGRDHGNAVSLLRVNNANSNQSNMLILQECCTDATGSYVIYAPVDVVAMNVVLNGGDPDYVALLPSGFAILPDGPDGGGGSLLTVAFQILVDSVPTAKLSLGSVATVNSLIACTVERIKAAITGDNGVAPPCPR

SEQ ID NO: 500 - DNA, 2442 bp, Oryza sativa
atgcagttcccgttctccggcgctggcccgggcgtcttcacgtcatcgccggcgctctccctcgcgctggcggacgcggtggcaggccggaacagcggcggcggtgggaagatggttaccgcggcccatggcggcgtcggcggaggaggaggaggaggacgcgcgaaggcgagggacgcgttggaggtggagaacgagatgagccggtccgggagcgaccacctcgacgtcgtctcttgcggcgacgcgggcggcggcggcggcgacgacgacgatgacgaggacgccgagcacggcaacccgcccaagcgcaagaagcggtaccaccgccacacgccgcagcagatccaagagctggaagcgatgttcaaggaatgcccccacccagacgagaagcagcgcgccgagctgagcaagcggctcggcctcgaaccccggcaggtcaagttctggttccagaatcggcgaacgcagatgaagatgcaactggagcgacacgagaactcgctgctgaagcaggagaacgataagctgcggtccgagaacctgtcaatccgggaggccacgagcaacgcggtgtgcgttggctgcggcggcccggcgatgctcggggaggtgtccctggaggagcaccaccttcgcgtcgagaacgcgaggctcaaggacgagctcagccgagtgtgcgcgctcgccgccaagttccttggcaagtccatctctgtcatggcgccaccgcagatgcatcagcctcatcctgtgccaggctcgtcgctggagcttgcggttgggggtatcggttcgatgccatcagccacgatgcccatctcgacgatcactgattttgctggcgccatgtccagttcaatgggcacggtgatcacgcccatgaagtctgaggctgaaccatcggcaatggctggcattgacaagtccttgttcttggagctagcaatgagtgcaatggatgagctagtcaagatggctcagatgggggatccgctatggattccaggtgcctccgtaccttcctcgccggcaaaggagagtctaaacttcgaggagtacctaaacaccttcccaccttgcatcggggtgaagcctgaagggtatgtatcagaggcatctagagaatctggcattgtcatcattgacgatggcgccgcgcttgtggagaccctcatggatgagcgacggtggtccgatatgttctcatgcatgattgccaaggcatcaaccactgaggagatttctactggtgttgctgggagtagaaatggtgcattgcttcttgtgagtgatgaacattctgttatgcaggcagagctacaggtgctttctcctcttgtgcctattagagaggtgaagtttctcaggttctccaaacagctggctgatggtgtatgggctgtagtggacgtttcggctgatgaattgatgagggatcagggcattacttctgcatcctcgactgcaaacatgaactgccgaaggctgccttctggttgtgtgctgcaggacactccaaatgggtttgttaaggtcacatgggttgaacatacagaatatgatgaggcatctgtgcacccgctctaccggcctcttctccggtctggtcttgcccttggtgcagggcgatggatcgcgacattacagcggcagtgcgaatgcttggcccttctcatgtcttctattgcattgccagagaacgactcatcagctatccatcctgaaggtaaacggagcatgttgaagttggcaaggaggatgacggacaacttctgtgcaggggtgagcacatcatctacccgtgaatggagcaaactggttggattgacaggcaacattggggaggatgtgcatgtaatggcgcggaagagtgtggatgaacctggaacgccgccaggtgtggtgcttagtgctgctacatctgtgtggatgcctgtgatgcctgaacggctcttcaacttcttgcacaacaaggggctgcgtgctgaatgggatatcctcagcaatggtggccctatgcaggaggtgacaagcattgccaaggggcaacagaatggcaataccgtatgtctactgaaggctagtcccaccaaagacaagcagaacagcatgctgatcctacaggagacgtgtgcagacgcatccggttcaatggttgtgtatgctcctgtagacatcccagcaatgcaccttgtcatgagtggtggggattcgtcatgcgtcgcccttcttccatcaggttttgccatcctgcctgctgggcctagcatcggcgcagatcacaagatgggcggttcattgctcaccgttgcattccagatacttgccaacagccagcccagtgctaagctcacggtggagtcagtcgagaccgtgagcaaccttatctcctgcaccatcaagaagatcaagacggcgctgcattgcgacgtgtga

SEQ ID NO: 501 - protein, 813 aa, Oryza sativa
MQFPFSGAGPGVFTSSPALSLALADAVAGRNSGGGGKMVTAAHGGVGGGGGGGRAKARDALEVENEMSRSGSDHLDVVSCGDAGGGGGDDDDDEDAEHGNPPKRKKRYHRHTPQQIQELEAMFKECPHPDEKQRAELSKRLGLEPRQVKFWFQNRRTQMKMQLERHENSLLKQENDKLRSENLSIREATSNAVCVGCGGPAMLGEVSLEEHHLRVENARLKDELSRVCALAAKFLGKSISVMAPPQMHQPHPVPGSSLELAVGGIGSMPSATMPISTITDFAGAMSSSMGTVITPMKSEAEPSAMAGIDKSLFLELAMSAMDELVKMAQMGDPLWIPGASVPSSPAKESLNFEEYLNTFPPCIGVKPEGYVSEASRESGIVIIDDGAALVETLMDERRWSDMFSCMIAKASTTEEISTGVAGSRNGALLLVSDEHSVMQAELQVLSPLVPIREVKFLRFSKQLADGVWAVVDVSADELMRDQGITSASSTANMNCRRLPSGCVLQDTPNGFVKVTWVEHTEYDEASVHPLYRPLLRSGLALGAGRWIATLQRQCECLALLMSSIALPENDSSAIHPEGKRSMLKLARRMTDNFCAGVSTSSTREWSKLVGLTGNIGEDVHVMARKSVDEPGTPPGVVLSAATSVWMPVMPERLFNFLHNKGLRAEWDILSNGGPMQEVTSIAKGQQNGNTVCLLKASPTKDKQNSMLILQETCADASGSMVVYAPVDIPAMHLVMSGGDSSCVALLPSGFAILPAGPSIGADHKMGGSLLTVAFQILANSQPSAKLTVESVETVSNLISCTIKKIKTALHCDV

SEQ ID NO: 502 - DNA, 2430 bp, Populus trichocarpa
atgtttggtgattgccaagttatgtcaaacatgggagggaatgtagtctcgtctgataacctctactcatcgccgatcggaaaccctaacttcagcttcatgtcaagcatgcccttccacactttctcacccatcatccctaaagaagaaaatgggttagtcatgcgagggaaggaggaaatggaaagtggttctggcagtgaacaacttgaagacaggtcagggaacgagcaagaaagcagcgagcaacctccaaagaagaaacgttaccataggcacactgcagctcagatccaagaaatggaagccatgtttaaagaatgtccacacccagatgacaaacaaagaatgagacttagccaagaacttggtctaaaaccacgccaagttaagttttggttccaaaaccgccgtacccaaatgaaggcacagcaagaccggtcggataatcttatactcagggcagaaaatgagagcttgaagaatgacaattacaggctacaagcggagttacgcaatcttatttgtcccaattgtgggggccaagccatgcttggagcaattccttttgaggaacttcgacttgaaaatgcaagacttagagatgagttggagcgtgtttgctgtattacttcacggtatggcggccggcaaatccactcaatggtaccggttccttcattcgttcccccttccttggatttggatatgaacatgtattcaaggccgtttccagagtatttgggcacttgcaccgatatgatgccggtgcctgtgcctgtgctggaagaaccatcttcatttcctgaggctggtgtggtattaatggaggagggaaaaggtcttgcgatggaacttgcattgtcgtccatggatgaacttgtgaagatgtgtcatgcaaatgagcctctttggatcagaaacattgaaaatgggaaggaagtgcttaatcttgaagagcacgggagaatgtttccatggccttccaatctcaagcagaattcaagtgagacgaggactgaagctactcgtgattgtgctgtggttataatgaatagcataaccttggttgacgctttcctggatgcaaataaatggatggagctgtttccctccattgttgctagagcaaaaactgttcaagttataacaccaggcatttccggtgcaagtggttctcttcacctgcagatgtatgctgaattgcaagttctttccccattggtgccaactcgggagacgtattttcttcgcttttgccatcaaaatgtagaggagggcacttgggccattgtcgatttccctcttgatagactccacgacaacatccagccgtcctttcccctgtataagagacatccgtccggttgtgttattcaagacatgcccaatgggtactcaagggtgacatggatagaacatgcagagatagaggagaagcctgtccatcagatatttagccagtatgtctatagtgggatggcattcggagcacatcgctggttaacagtcttacagagacaatgcgagagggttgctagcctcatggctagaaatatctctgacctaggagtaataccctctcctgaagcacggaagaatatgatgagactggctcaaagaatgatcagaatatttagcctgaatatcagctcttctagtggccaatcatggaccggtttatcggattcatatgatgacactgttagaattaccacaaggaaaatcactgagcctgggcagcctaatggggttattctctctgcagtatccacaacttggctgccctatcctcactaccaagtctttgacctcttgagggatgaacatcgcagatctcagctggaacttctttccaatgggaatgccttgcatgaggttgctcacattgccaatggctctcatccaggaaactgcatttctcttctgcgcatcaacgttgcaagcaactcatcacagcatgtagagctcatgctacaagagtgttgcactgatcaatccggcagccttgttgtctacaccaccgttgatgttgagtcaattcagctggcaatgagtggcgaggatccatcctgcattcctctacttccactaggttttgtcatagttccagtagaatccagcagtgctgttagtgaaggcaactcaatgccatctaattccgaggatggaaacggtcataacaactcaggctgtctactcactgtggggctccaagtccttgcaagcactattccatctgcaaagctcaacctctccagcgttactgcaataaacaaccatctgtgcaacacagtgaaccaaatcaccgctgctcttagcagcaccaccacaaccaccaccatcaccaccactagcagctgccttgacaacggcaatgctgtaggctcttgcaatatcgagcctacagctgcatcgaaacaggtttag

SEQ ID NO: 503 - protein, 809 aa, Populus trichocarpa
MFGDCQVMSNMGGNVVSSDNLYSSPIGNPNFSFMSSMPFHTFSPIIPKEENGLVMRGKEEMESGSGSEQLEDRSGNEQESSEQPPKKKRYHRHTAAQIQEMEAMFKECPHPDDKQRMRLSQELGLKPRQVKFWFQNRRTQMKAQQDRSDNLILRAENESLKNDNYRLQAELRNLICPNCGGQAMLGAIPFEELRLENARLRDELERVCCITSRYGGRQIHSMVPVPSFVPPSLDLDMNMYSRPFPEYLGTCTDMMPVPVPVLEEPSSFPEAGVVLMEEGKGLAMELALSSMDELVKMCHANEPLWIRNIENGKEVLNLEEHGRMFPWPSNLKQNSSETRTEATRDCAVVIMNSITLVDAFLDANKWMELFPSIVARAKTVQVITPGISGASGSLHLQMYAELQVLSPLVPTRETYFLRFCHQNVEEGTWAIVDFPLDRLHDNIQPSFPLYKRHPSGCVIQDMPNGYSRVTWIEHAEIEEKPVHQIFSQYVYSGMAFGAHRWLTVLQRQCERVASLMARNISDLGVIPSPEARKNMMRLAQRMIRIFSLNISSSSGQSWTGLSDSYDDTVRITTRKITEPGQPNGVILSAVSTTWLPYPHYQVFDLLRDEHRRSQLELLSNGNALHEVAHIANGSHPGNCISLLRINVASNSSQHVELMLQECCTDQSGSLVVYTTVDVESIQLAMSGEDPSCIPLLPLGFVIVPVESSSAVSEGNSMPSNSEDGNGHNNSGCLLTVGLQVLASTIPSAKLNLSSVTAINNHLCNTVNQITAALSSTTTTTTITTTSSCLDNGNAVGSCNIEPTAASKQV

SEQ ID NO: 504 - DNA, 2415 bp, Populus trichocarpa
atgtttggtgatcgccaagttatgtcaaacatgggagggaatgtagtctcctccgataccatctattcgttgccgatcgaaaaccctagcttcaacttcatgtcaagcatgcctttccacactctctcccccattatctctaaagaaggaaacgggctagttatgccaggtaaggaggaagtggaaagtgggtctggctgtgaacaacttgaagagaagtcagggaatgaggaagagagcagcgagcaacctccaaagaagaaacgttaccacaggcacactgcacgccagatccaagaaatggaagccatgtttaaggaatgcccacacccagatgacaaacaaagaatgagactcagccatgaacttggtctaaaaccacgccaagtcaagttttggttccaaaaccgccgtacccaaatgaaggcacaacaagaccgatcggataataatatactcagggcagaaaatgagagcttgcagaatgataattacaggctacaagcggagttacgaaatcttatttgtcccgattgtggaggtcaagccatgcttggagaaattccctttgaggatcttcgacttgaacatgcaagacttagagaagagttggagcgcgtttgttgtattgcttcaagatatggcggccggccaatccactcaatggtaccggctcctgcttttgttcccccttccttggatttggatatgagcatatattcaaggccgtttccggagtctttgggcacttgcattgatatgatgcctatgcctatgttgccagaaccatcttcctttcctgaggctggtatagtattaatggaggagggagaaggtcttgcaatggggcttgcattgtcgtccatggatgaacttgtgaagatgtgtaatgcaaatgagcctctttggatcacaaacaatgagaatggaaaggaagtgcttaatcttgaagagcatgcgagaatgtttccatggccttccaatctcaaacagaactctagtgacatgaggactgaagctactcgtgattgtgctgtggttataatgaatagcattaacttggttgatgctttcctggatgctaataaatggatggagctgtttccctccattgttgctagagcaaaaactgttcaagttataaaaacaggcgtttgcggtgcaagcggttcccttcacctgatgtatgcagaattgcaagttctttccccattggtgccaactcgagaaacacattttcttcgcttttgccaacaaaatgtagaggagggcacttgggctattgtcgattttcccctcgatagcttccacgacaacatccgaccttcctttcccctgtacaggagacgtccgtccggctgtgtaattcaagacttgcccaatgggtactcaaagttgacatggatagaacatgcagagatagaggataagcctgtccatcagatatttagccagtatatctatagtgggatggcatttggagcacatcgctggttagcagtcttacagagacaatgcgagagagttgcaagcctcatggctagaaatatctctgacctaggagtaataccctctcctgaagcacggaagaacatgatgagactggctcaaagaatgatcagaacttttagcctgaatatcagcacttctagtggccaatcatggacagctttacccgattcccatgatggcactgttagaattatctcaagggaaatcacggagcctggccagcctaatggggtcattctctctgcagtatccacaacttggctgccctatcctcacttcctagtctttgatctgttgagggatgaacatcgcagatctcagctggaagttctttccaatgggaatgccttgcatgaggttgctcacattgccaacggctctcatccaggaaactgcatctctcttcttcgcatcaacgtcgccagcaactcatcacagcatgtagatctcatgctacaagagagttgcactgatcaatcaggcagccttgtcgtgttcaccaccgtggacgttgagtcaattcagctggcaatgagcggcgaggatccatcatgcattcctctacttccactaggttttgtcatagtcccagtagaatccagcagtagcactgtcagtgaaggcaattcaatgcaatctaattctgaggatggaaatggaaatggacataacaactcaggctgcctactgactgtgggtctccaagcccttgcaagcactattccatctgcaaagctcaatttctccagtgtcactgcgataaacaaccatttgtgcaacacagtgaaccaaatcactgttgctcttagcaacaacaccaccaccactagcagctgccttgataacagcaatgctgtagggtcttgcaatgagcctacagctgcacccaaacaacaagtttag

SEQ ID NO: 505 - protein, 804 aa, Populus trichocarpa
MFGDRQVMSNMGGNVVSSDTIYSLPIENPSFNFMSSMPFHTLSPIISKEGNGLVMPGKEEVESGSGCEQLEEKSGNEEESSEQPPKKKRYHRHTARQIQEMEAMFKECPHPDDKQRMRLSHELGLKPRQVKFWFQNRRTQMKAQQDRSDNNILRAENESLQNDNYRLQAELRNLICPDCGGQAMLGEIPFEDLRLEHARLREELERVCCIASRYGGRPIHSMVPAPAFVPPSLDLDMSIYSRPFPESLGTCIDMMPMPMLPEPSSFPEAGIVLMEEGEGLAMGLALSSMDELVKMCNANEPLWITNNENGKEVLNLEEHARMFPWPSNLKQNSSDMRTEATRDCAVVIMNSINLVDAFLDANKWMELFPSIVARAKTVQVIKTGVCGASGSLHLMYAELQVLSPLVPTRETHFLRFCQQNVEEGTWAIVDFPLDSFHDNIRPSFPLYRRRPSGCVIQDLPNGYSKLTWIEHAEIEDKPVHQIFSQYIYSGMAFGAHRWLAVLQRQCERVASLMARNISDLGVIPSPEARKNMMRLAQRMIRTFSLNISTSSGQSWTALPDSHDGTVRIISREITEPGQPNGVILSAVSTTWLPYPHFLVFDLLRDEHRRSQLEVLSNGNALHEVAHIANGSHPGNCISLLRINVASNSSQHVDLMLQESCTDQSGSLVVFTTVDVESIQLAMSGEDPSCIPLLPLGFVIVPVESSSSTVSEGNSMQSNSEDGNGNGHNNSGCLLTVGLQALASTIPSAKLNFSSVTAINNHLCNTVNQITVALSNNTTTTSSCLDNSNAVGSCNEPTAAPKQQV

SEQ ID NO: 506 - DNA, 2373 bp, Populus trichocarpa
atgcccactggtgcaatagctcagactcgccttgtctctccttctatcactaaatccatgttcaactctcctggactctctctagcccttcaacagccaaacatagatggtcaaggagatataactagaatggctgagaactttgagacaagtgtgggtaggagaagcagagaagaggaacatgagagcagatctggtagtgataacatggatggtgcgtctggtgacgatcaagatgcagctgataatcctccaagaaaaaagagataccaccgacacactccacaacaaatccaagaacttgaagctttgtttaaggaatgtcctcatcctgacgagaaacaaagattggagcttagtagaaggctgtgcttggagactaggcaagtcaagttctggtttcaaaatcgtagaacccaaatgaagactcaactggagcgccatgagaactcattactcaggcaagataacgacaagcttcgagcagaaaacatgtccataagagatgccatgagaaatccatcgtgctcaaactgtggtggtcctgcgataattggtgatatgtcacttgaagaacagcatttgaggattgagaatgctagattaaaagatgaactagatcgagtttgtgcacttgcgggcaagttcttgggtcgccccatatcttcgttagcttcttcacttagccctccgacgaattcaagcctggaacttgcagttggtagtaatggttttgctggtttaagcaccattgctacaacattgcctttgggacctcattttgaaggtgggatttctggtgctttgtctatggtaactcaaactagactagcaacagctggtgttactggtattgatagatcagtagagagatccatgttcttggagttggctttagctgccatggatgaattggtgaaaatggttcagacggatgagcctctttggatcgggagctttgagggtggtagagaaatattgaaccatgaggggtacttgagaaccttcactccttgcattggaatgaagcctagtggctttgttagtgaggcttctagagagactggtatggtaatcataaacagtttggccttagttgagacactgatggattcgaaccgatgggcagaaatgtttccttgtatgattgcaaggacctctaccactgatgtgatagccagtggaatggggggaactagaaatggttcacttcagttgatgcaagccgagctccatgttttatccccattggttccggtgcgtgaggtcaattttctccgattttgcaagcagcacgcagagggggtttgggctgttgttgatgtatccattgataccatccgagatacttccggtgcaccaccgacatttgtgaactgcaggaggcttccttctggttgtgtggtgcaagatatgcccaatgggtactccaaggttacatgggttgagcatgcacaatatgatgaaaggcaaatacaccagctctatcggccggtgataagctccggcatgggcttcggtgcccaacgatggatagctacccttcaacgtcaatgcgagtgtttggccatcctcttgtcctccaatgtacctagtagagaccacacagcgataactacaagtggtcgccgaagcatgttgaagctggcgcaaagaatgaccgataacttctgtgctggggtttgtgcctccacagtgcacaaatggaacaagctgaatgccggaaatgttgatgaagatgttagggttatgacccgaaagagtgtcgatgatcctggtgagccaccaggcatagttttgagcgctgcgacctctgtttggctacctgtttctccacaaaggctctttgatttcctacgcaatgaacgactcagaagcgagtgggacatactctccaacggtggaccaatgcaggaaatggcccacattgctaaaggccaggatcacggcaactgtgtctctctcctacgtgctagcgccatgaatgctaaccagagtagcatgctaatactgcaagagacatgcatagatgcagcaggctctcttgtagtgtacgctcccgttgacactccggccatgcacgtagtgatgaacggtggtgattcggcttacgtggcgcttcttccgtcagggtttgctatcgtaccggatgggcctggttcacgtgaccccccatcgactaatggcggcccgactgctaataatgtcggtggccaagagagggtgagtgggtcccttttgacggtggccttccaaatattggtgaatagtctacctacggcgaagcttacagtagaatctgtggagacagtcaacaaccttatttcatgcactgtccaaaagatcaaggctgctctccaatgtgaaagctga

SEQ ID NO: 507 - protein, 790 aa, Populus trichocarpa
MPTGAIAQTRLVSPSITKSMFNSPGLSLALQQPNIDGQGDITRMAENFETSVGRRSREEEHESRSGSDNMDGASGDDQDAADNPPRKKRYHRHTPQQIQELEALFKECPHPDEKQRLELSRRLCLETRQVKFWFQNRRTQMKTQLERHENSLLRQDNDKLRAENMSIRDAMRNPSCSNCGGPAIIGDMSLEEQHLRIENARLKDELDRVCALAGKFLGRPISSLASSLSPPTNSSLELAVGSNGFAGLSTIATTLPLGPHFEGGISGALSMVTQTRLATAGVTGIDRSVERSMFLELALAAMDELVKMVQTDEPLWIGSFEGGREILNHEGYLRTFTPCIGMKPSGFVSEASRETGMVIINSLALVETLMDSNRWAEMFPCMIARTSTTDVIASGMGGTRNGSLQLMQAELHVLSPLVPVREVNFLRFCKQHAEGVWAVVDVSIDTIRDTSGAPPTFVNCRRLPSGCVVQDMPNGYSKVTWVEHAQYDERQIHQLYRPVISSGMGFGAQRWIATLQRQCECLAILLSSNVPSRDHTAITTSGRRSMLKLAQRMTDNFCAGVCASTVHKWNKLNAGNVDEDVRVMTRKSVDDPGEPPGIVLSAATSVWLPVSPQRLFDFLRNERLRSEWDILSNGGPMQEMAHIAKGQDHGNCVSLLRASAMNANQSSMLILQETCIDAAGSLVVYAPVDTPAMHVVMNGGDSAYVALLPSGFAIVPDGPGSRDPPSTNGGPTANNVGGQERVSGSLLTVAFQILVNSLPTAKLTVESVETVNNLISCTVQKIKAALQCES

SEQ ID NO: 508 - DNA, 2124 bp, Populus trichocarpa
atggagtatggcagtgttggaggaggaactagtggcggtggtggtggagaccatgactcctctgatcctcaaaggaggaagaagcgttatcaccgccacactgctctccagattcagaagttggagtcaatgtttaaggagtgtccacacccagatgagaaacaaaggttacagttaagtagagagttgggtttggcaccaagacagatcaagttttggtttcaaaacaggaggacccagatgaaggctcaacatgaaagagcagataactcttctcttagagctgagaatgataagatccgatgtgagaatatagccattagagaggcactcaagaatgtaatatgcccctcttgtgggggtcctcctgttacggaggattcctattttgatgaacacaaactaagaatggagaatgttcaattgaaagaagagcttgatagagtttctagcattgctgctaaatacatagggaggccaatttcccaactccctccagtgcaaccttttcacatttcttccttggatttatcaatggggaattttggggcccaagggattggtggcccttcacttgatcttgatcttatcccaactagttcaaatttggctttccaacctccagtcatttcggatatggacaagtcccttatgactgatgttgctgcaaatgctatggaggaattgttaaggcttttgcaaaccaacgaacctttgtggatgaaatcgtccgctgatgggagagatgttcttaatctcgatagctaccagaggatctttccaagggctatgagtcacttaaagaatcccaatgttcgaatagaagcatcccgagattcaggtgttgttatcatgaatggtgtagctttggttgacatgtttatggattcaaacaagtgggtcgaatcatttcccacgatggtgtctgtggcaaagaccattgaagtaatttcatctggaatgttgggtagtcacagtggttctttgcaactgatgtatgaagagttgcaggtgctttcacccctggttccgactcgggaattctgtatcctccggtattgtcagcaaattgagcaaggcttatgggcaattgttagtgtttcatatgatattccacagtttgcctcccaatttcgatgtcataggcttccctctggatgcttgattcaggatatgccaaatggatactcaaaggttacttgggtggaacatgtagagatcgaagacaaaaccacaactcatcagctttatagggatctcattcacagtggtatggcttttggagctgaacgatggcttgctacacttcaaaggatgtgcgaaagagtggcatgtcaaatggtgtccggcaattcgacccgggatcttggaggagtaattccatcaccagaaggtaagagaagcatgatgaaacttgcccaacgaatggtcagcagtttctgttctagcataagcacatctaacagccaccgatggagcacactatctgggttgcatgatgttggagttcgagttacactccataagagcacggatcctggccaacctaatggtgtagttctaagtgcagctaccacattttcacttccagtttctcctcaaaatgtcttcagtttcttcaaggatgaaagaacccgaccacagtgggatgtactctctagcggcaatgcagtccaagaagttgcccatatcacaaatggttcacatcccgggaactgcatatctgttcttcgagcctacaacactagtcagaacaatatgttaatactgcaagagagctgtgtcgactcatcaggttcacttgtagtctattgtcccgtcgatctaccagccatcaacatagcaatgagcggtgaggacccttcttatatacctctgctgccatcaggattcgccatttctcctgatggccgtcctgaccaaggagatggtgcatcaacaagctctaatacacaaggaagcacggccaggttgagcggttcactaattacagtagcatttcaaatactagtcagcagcttgccatctgctaaactgaacctggagtcagtgaatactgttaataaccttattggcaccactgtccagcaaattaaggctgccatgaattgtcctagttcctga

SEQ ID NO: 509 - protein, 707 aa, Populus trichocarpa
MEYGSVGGGTSGGGGGDHDSSDPQRRKKRYHRHTALQIQKLESMFKECPHPDEKQRLQLSRELGLAPRQIKFWFQNRRTQMKAQHERADNSSLRAENDKIRCENIAIREALKNVICPSCGGPPVTEDSYFDEHKLRMENVQLKEELDRVSSIAAKYIGRPISQLPPVQPFHISSLDLSMGNFGAQGIGGPSLDLDLIPTSSNLAFQPPVISDMDKSLMTDVAANAMEELLRLLQTNEPLWMKSSADGRDVLNLDSYQRIFPRAMSHLKNPNVRIEASRDSGVVIMNGVALVDMFMDSNKWVESFPTMVSVAKTIEVISSGMLGSHSGSLQLMYEELQVLSPLVPTREFCILRYCQQIEQGLWAIVSVSYDIPQFASQFRCHRLPSGCLIQDMPNGYSKVTWVEHVEIEDKTTTHQLYRDLIHSGMAFGAERWLATLQRMCERVACQMVSGNSTRDLGGVIPSPEGKRSMMKLAQRMVSSFCSSISTSNSHRWSTLSGLHDVGVRVTLHKSTDPGQPNGVVLSAATTFSLPVSPQNVFSFFKDERTRPQWDVLSSGNAVQEVAHITNGSHPGNCISVLRAYNTSQNNMLILQESCVDSSGSLVVYCPVDLPAINIAMSGEDPSYIPLLPSGFAISPDGRPDQGDGASTSSNTQGSTARLSGSLITVAFQILVSSLPSAKLNLESVNTVNNLIGTTVQQIKAAMNCPSS

SEQ ID NO: 510 - DNA, 2247 bp, Populus trichocarpa
atggatagtcatggtgacatgggcctacttggggaacattttgatcctagtttggtagggaggatgagggaggatggttatgagagcaggtctggaagtgataacattgaaggtgcatctggggaagatcaggatgctggagattatcaaaggcctaggaagaagtacaatagacacactgctaatcaaatacaagagcttgaatctttctttaaggaatgtcctcatcctgatgaaaaacaaagatcagagcttagcaggaggcttggcttggaaagcaagcaaatcaagttttggtttcaaaataggagaactcaaatgaagacccagttggaacggcatgagaatgcaatcctcaggcaagaaaatgataaactccgagctgagaatgagttgttgaaacaaaacatgagtgatccaatttgcaacaattgtggtggtcctgtggtgcctgttccagtgtcttatgagcagcagcagttaagaattgaaaatgctcgattgaaggatgaattaggccgtgtttgtgccctagccaataagtttttaggcagacctctcacatcctcggccagtcctgtccctccctttggctcaaacaccaagttcgaccttgcagttgggagaaatggttatggcaatttaggccatacagacaacacgttgccaatggggcttgacaataatggaggggttatgatgcctctgatgaaaccaataggcaatgctgttggcaatgaagtaccatttgatagatcaatgtttgtagatcttgcactggctgctatggatgaattgattaagattgctcaggttgaaagtcccatttggatcaaaagcttggatggagggaaggaagtcctgaaccatgaagagtatatgaggacttttcctccttgtattggcatgaaacccagcaattttgttatcgaggcaactcgggagagtggtgtagtactcgccaacagcttggatctggttgagacattgatggacgtgaatggatgggtggaaatgtttcccagcttgattgctagagctgcgaccattgatatcgtatcaagtggcatgggcggaacaaaaagtggagctttgcaaatgatacatgctgaatttcaagtgatttctccttttgtccctgtgcgtcaagtgaagttccttcggttatgcaagcaactagcagagggtgtgtgggctgtggctgatgtttctgttgatggaaaccaggaaaatctaaatgcacaaacccctgtaacctgcagaaggcttccttctggctgcataatacaagacatgaacaatggttgctgcaaggttacatgggtggaacattctgaatatgatgagagtgcagtccatcgactctaccgacacatactaaattctggcatgggctttggtgcacagaggtggattgccgcccttcaacggcactacgagtgcatggcaatgctcttgtcccctaccattttgggtgaagatcagacagtgataaatctgggaggtaagaaaagcatgttaaagttggcacgacgaatggtggatagcttctgttctggggtctgtgcttctactttgcataactggggcaaccttgtggttgaaagtgtgagtgaagatgtgaggattttgacccgaaagattatcaatgaacctggtgagccagatggtattgtgctgagtgtttcaacttctgtttggctgccggtttcacaacaaaggttatttgactttttgagggatgaacaatcaaggagccaatgggacattttatccaatggtggaatattgcaggagatggtccaaatccccaagggccagggacattggaacactgtctctgtcttgcgttcaactgctgttgatgctaacgcgagtgacaacatgttgatattgcaagaaacctggaatgatgtctcgggttcgttagtagtgtacgcaccagtcgacgtacaatcagtgagtgtagtgatgaatggtggagactctacctatgtggctctcttgccatcaggatttgtgattcttccaggcaattcattcagtaatggtgagccaaacaactgcaatgggaatccagctaagagagactgtgatggcaacagtggaggcggatcttttttgactgttggattccaaattttggcgagcaaccttccttcagccaaactcacagtcgagtcagtcaagacagttcacaatcttatctcctgcaccatgcagaggatcaaaacagccttcaactaa

SEQ ID NO: 511 - protein, 748 aa, Populus trichocarpa
MDSHGDMGLLGEHFDPSLVGRMREDGYESRSGSDNIEGASGEDQDAGDYQRPRKKYNRHTANQIQELESFFKECPHPDEKQRSELSRRLGLESKQIKFWFQNRRTQMKTQLERHENAILRQENDKLRAENELLKQNMSDPICNNCGGPVVPVPVSYEQQQLRIENARLKDELGRVCALANKFLGRPLTSSASPVPPFGSNTKFDLAVGRNGYGNLGHTDNTLPMGLDNNGGVMMPLMKPIGNAVGNEVPFDRSMFVDLALAAMDELIKIAQVESPIWIKSLDGGKEVLNHEEYMRTFPPCIGMKPSNFVIEATRESGVVLANSLDLVETLMDVNGWVEMFPSLIARAATIDIVSSGMGGTKSGALQMIHAEFQVISPFVPVRQVKFLRLCKQLAEGVWAVADVSVDGNQENLNAQTPVTCRRLPSGCIIQDMNNGCCKVTWVEHSEYDESAVHRLYRHILNSGMGFGAQRWIAALQRHYECMAMLLSPTILGEDQTVINLGGKKSMLKLARRMVDSFCSGVCASTLHNWGNLVVESVSEDVRILTRKIINEPGEPDGIVLSVSTSVWLPVSQQRLFDFLRDEQSRSQWDILSNGGILQEMVQIPKGQGHWNTVSVLRSTAVDANASDNMLILQETWNDVSGSLVVYAPVDVQSVSVVMNGGDSTYVALLPSGFVILPGNSFSNGEPNNCNGNPAKRDCDGNSGGGSFLTVGFQILASNLPSAKLTVESVKTVHNLISCTMQRIKTAFN

SEQ ID NO: 512 - DNA, 2286 bp, Populus trichocarpa
atgccagccggagtaatgattccggcaagaaacatgccatcaatgatcggggttaatggtaatgttggtgggtttggatcatcctccggacttgctcttggtcagccaaacatgatggaaggtcacgagtttcatcatctagacatgacacacaacacatctgaaggcgacatgactcgaattagagatgaggaatttgatagtaccaacacaaaatcaggcagtgagaatcaagaaggcgcttcaggtgatgatcaagacccacgccccaaaaagaagcgctaccatcgccatacccagcatcagatccaagaaatggaagctttcttcaaagagtgtccacacccagatgacaagcaaaggaaggagttaagccgagaattagggttagagcctttgcaagtcaagttttggttccaaaataagcgtacccaaatgaagacccagcatgagcgccatgaaaacacacagcttcgaaatgagaatgaaaagcttagggctgacaacatgcggtacagggaagctcttagcaatgcctcgtgtcctaattgcggagggcctactgccataggagagatgtcctttgatgaacatcatttgagacttgaaaatactagattgagagaagagattgaccgtatttcagcaattgctgctaggtatgttggcaagcctgtggtgaactatcctgttctatcgcctccaatgcctccacgtccagttgaccttggtgttgggaattttggtggacaaccaggcttaggaggggatatttatgaagctggagacctactaaggtctattagtgcacctactgaggctgataagcccatgataattgagcttgcagtggcagccatggaggaactaattagaatggctcaaatggatgaacctttatggatgaacagccttgatggaattgatgcagtgttgaatgaagatgaatacataaggatattccctcatggtattggtcctaaacctactggttttaaatgtgaggcttcaagagagtctgctgttgttatcatgaaccacatcaaccttgtcgagtatctgatggatgtgaatcagtggtctacattgttttctggcattgtctcaagagctttgactttagaagtgctatctacaggagttgcagggaactacaatggagccttgcaagtgatgacagctgaatttcaacttccaactccacttgttcctactcgtgaaagttactatgtcaggtactgtaaacaacatgctgatgggacttgggctgtggttgatgtttcattggacagtatacgccctggtccagcagcaagatgtcgaagaaggccatctggatgtttaattcaagaaatgcccaatggttactcgaaggttacatgggttgaacatgtagaagtggatgatagaggtgttcataatctatacaagcatctagttagctcaggacatgcattcggggcaaaacgttgggtcgcaaccctaaaccggcaatgcgagcgccttgccagtgccatggcaacaaacattcctgctggtgatgctggtgttattactaatcaagaaggaagaaagagtatgatgaagctggcagagagaatggtgataagcttctgtgctggcgtgagcgcctctaccgcccacacatggactacactatctgggactggagctgatgatgtcagggtcatgacaaggaagagtgtagatgatccagggaggcctcctgggattgtgcttagtgcagcaacttccttctggcttccagttccaccaaagagggtttttgattttctacgtgatgagaacacccgtaatgagtgggatattctatcaaatggtggggttgtccaagaaatggcacacattgctaatggccgggatacaggcaactgtgtatctctaatccgagttaatagcgcgaattcgagccagagcaacatgctgattttgcaagagagttgcactgatcaaacggcctctttcgtaatctatgctcctgttgatattgttgcaatgaacgtggtgcttaacggcggggatccagattatgtggcacttcttccatcagggtttgctatttttcctgatggaaccgcagcgcatggagtaggcatggatgaatctgggtctacaggaggatctcttctaactgtcgcgttccagattctggttgattcagttcctacagcaaaactgtctcttggctcagttgcaactgttaacaacttgattgcatgcactgtggagaggattaaggcttccttatcatgcgaatctgcatga

SEQ ID NO: 513 - protein, 761 aa, Populus trichocarpa
MPAGVMIPARNMPSMIGVNGNVGGFGSSSGLALGQPNMMEGHEFHHLDMTHNTSEGDMTRIRDEEFDSTNTKSGSENQEGASGDDQDPRPKKKRYHRHTQHQIQEMEAFFKECPHPDDKQRKELSRELGLEPLQVKFWFQNKRTQMKTQHERHENTQLRNENEKLRADNMRYREALSNASCPNCGGPTAIGEMSFDEHHLRLENTRLREEIDRISAIAARYVGKPVVNYPVLSPPMPPRPVDLGVGNFGGQPGLGGDIYEAGDLLRSISAPTEADKPMIIELAVAAMEELIRMAQMDEPLWMNSLDGIDAVLNEDEYIRIFPHGIGPKPTGFKCEASRESAVVIMNHINLVEYLMDVNQWSTLFSGIVSRALTLEVLSTGVAGNYNGALQVMTAEFQLPTPLVPTRESYYVRYCKQHADGTWAVVDVSLDSIRPGPAARCRRRPSGCLIQEMPNGYSKVTWVEHVEVDDRGVHNLYKHLVSSGHAFGAKRWVATLNRQCERLASAMATNIPAGDAGVITNQEGRKSMMKLAERMVISFCAGVSASTAHTWTTLSGTGADDVRVMTRKSVDDPGRPPGIVLSAATSFWLPVPPKRVFDFLRDENTRNEWDILSNGGVVQEMAHIANGRDTGNCVSLIRVNSANSSQSNMLILQESCTDQTASFVIYAPVDIVAMNVVLNGGDPDYVALLPSGFAIFPDGTAAHGVGMDESGSTGGSLLTVAFQILVDSVPTAKLSLGSVATVNNLIACTVERIKASLSCESA

SEQ ID NO: 514 - DNA, 2136 bp, Populus trichocarpa
atggagtatggcagtgctggaggaggaagtggtggtggtggtggcggggaccatgattcctctgaccctcaaaggaggaagaagcgttatcaccgccacactgctcaccagattcagaagttggaatcaatgtttaaggagtttccacacccagatgagaaacaaaggttacagttaagtagagagttgggtttggcaccaagacagatcaagttttggttccaaaacaggaggacccagatgaaggctcaacatgaaagagcagataacagctctcttagagctgagaatgataagatccggtgtgagaatatagccattagagaggcgctcaagaatgttatttgcccctcttgtggggcgcctcctgttacggaggattcctattttgatgaacagaaattaagaatcgagaatgctcaattgaaagaagagcttgatagagtttctagcattgctgctaaatacatagggagaccaatttcccaactccctccggtgcaacctgttcacatttcttcattggatttatcaatggggaattttggtggccaaggtcttggtggtcctgcacttgatcttgatcttgatcttgatcttataccgactaattcaaatttggcttttcaaccgcctggcatttcggacatggacaagtctctcatgactgatgttgctacaaacgcaatggaggaactgttgaggcttttgcaagctaatgaatctttatggatgaaatcgtccactgatgggagagatgttcttaatctcgatagctaccaaaggatctttccaagggctatgagtcacttaaagaatcccaatgttcgaattgaatcatcccgagattcaggtgttgttatcatgaatggtgtagccttggttgacatgtttatggattcaaacaagtgggtcgaatcatttcccaccatcgtgtctgtggcaaagaccattgaagtcatttcatctggaatgttgggtaatcacagcggttccttgcaactgatgtatgaagagttgcaggtgctttcacccctggttccaactcgggaattctgtatcctccggtattgtcagcaaattgagcaaggcttgtgggcaattgttagtgtttcatatgatattccacagtttgcttcccaatttcaatgtcacaggcttccctctggatgcttgattcaggatatgcctaatggatactcaaaggttatttgggtggaacatgtagagatagaagacaaagccccaacccaccagctttatagggatctcattcacagcggtttggcctttggagcagaacggtggcttgctacactgcaaaggatgtgtgaaagggtggcatgtcaaatggtgtcaggaagttcaactcgagatcttggaggagtaattccatcaccagaaggtaagagaagtatgatgaaacttggccagcgaatggtcagcagtttctgttctagcataagcacatctaacagccaccgatggagcacactatccgggttgcatgacgttggagttcgaattacactccataagaacacggatcctggccaacctaatggtgtagttctaagtgcggcgactacattttcgcttccagtatctcctcaaaatgtcttcaatttcttcaaggatgaaaagactcgaccacagtgggatgttctctctagtggcaatgcagtccaagaagttgcccatattgcaaatgggtcccatcctgggaactgcatatctgttcttcgagcctacaacactagccagaacaatatgttaatacttcaagagagctgcatggactcatcaggttcacttgtagtctattgccctgtcgatctaccagccatcaacatagcaatgagtggggaggacccttcctatatacctcttctgccatcaggattcaccatttcacctgatggttatcctgaccaaggagatggtgcatccacaagctctaatacacaaggacgcatggctaggtcgagtggttcactaatcacagtagcttttcaaatattagttagcagcttgccatctgctagactgaacctggagtcagtgaataccgttaatagccttattggaaccaccatccagcaaattaaggctgccttgagttgtcctggttcctga

SEQ ID NO: 515 - protein, 711 aa, Populus trichocarpa
MEYGSAGGGSGGGGGGDHDSSDPQRRKKRYHRHTAHQIQKLESMFKEFPHPDEKQRLQLSRELGLAPRQIKFWFQNRRTQMKAQHERADNSSLRAENDKIRCENIAIREALKNVICPSCGAPPVTEDSYFDEQKLRIENAQLKEELDRVSSIAAKYIGRPISQLPPVQPVHISSLDLSMGNFGGQGLGGPALDLDLDLDLIPTNSNLAFQPPGISDMDKSLMTDVATNAMEELLRLLQANESLWMKSSTDGRDVLNLDSYQRIFPRAMSHLKNPNVRIESSRDSGVVIMNGVALVDMFMDSNKWVESFPTIVSVAKTIEVISSGMLGNHSGSLQLMYEELQVLSPLVPTREFCILRYCQQIEQGLWAIVSVSYDIPQFASQFQCHRLPSGCLIQDMPNGYSKVIWVEHVEIEDKAPTHQLYRDLIHSGLAFGAERWLATLQRMCERVACQMVSGSSTRDLGGVIPSPEGKRSMMKLGQRMVSSFCSSISTSNSHRWSTLSGLHDVGVRITLHKNTDPGQPNGVVLSAATTFSLPVSPQNVFNFFKDEKTRPQWDVLSSGNAVQEVAHIANGSHPGNCISVLRAYNTSQNNMLILQESCMDSSGSLVVYCPVDLPAINIAMSGEDPSYIPLLPSGFTISPDGYPDQGDGASTSSNTQGRMARSSGSLITVAFQILVSSLPSARLNLESVNTVNSLIGTTIQQIKAALSCPGS

SEQ ID NO: 516 - DNA, 2121 bp, Populus trichocarpa
atgactcgagcaagctcaaagatgatgactatgagaccaaatcgggcaccgaaactatggaagctcagtccggtgatgaccaagatcccagtgaacaacaccccaaaaagaagcgttatcatcgccatacacagcgtcaaatccaggacatggaagcgtaagcatttcttcaaggaatgccctcatcctgacgacaaacaacggaaggagctcagccgtgagctaggtttagagccattgcaagtcaaattttggttccaaaacaagcgcactcaaatgaaggctcaacatgaacgcagtgagaattcaattcttaaggctgagaatgaaagacttcgtgtggagaacaatagatacaaggaagccctacgtaatgcttcatgccctaactgtgggggtccagctgctcttggtgagatgtcttttgatgagcagcatttgaggattgagaatgttcgtctaagagaagagattgacaggatttctggaattgctgccaagtatgttggcaagcctttgtcttctctttccaacctttctcctcatttaccgtcccggtctcttgatctcggagttagcaattttggggcacagtcgggtttcgtaggggagatgtttggagctactgatcttcttagatcagtcactggacctactgaggcagacaaatcaatgatagttgaaatcgcggttgcagcaatggaggaactaatgagaatagctcaggctggagaacccttgtggattcaaggagagaacaatactgagatgctcaatgaagaggaatatttgagaactttcactaggggaattggaccaaaacctttaggaatgagatctgaagcttcaagggaatccgcagttgttatcatgaatcatgttaatcttgttgagattcttatggacgcgaatcaatggtcaactattttctgtggtattgtatcaagagcaatgaccctggaagtcctatcaacaggagtggcagggaactataatggagcattacaagtgatgacagctgagtttcaagtaccttccccaattgttcctacacgagaaaattactttgtgaggtactgcaaacagcataccgatgggacttgggcagtggtagatgtttccttggacagtttacgccctagtctgctgtcgaaatgtagaagaaggccatcaggttgcttgatccaagaattgccaaatggttattcaaaggtcgtctgggttgaacacattgaagtggatgatagatctgttcaaaatatatacagaccactagtcaactctggtcttgcttttggagcaaaacgttgggtgggaacacttgatcgacaatgcgaacgtcttgcaagctccatggccattaacattccatctggagatctctgtgtgataacaaccgctgaagggaggaaaagtatgctgaagctggccgagagaatggtgatgagtttttgcactggagttggtgcttctactgcacatgcatggacgacattgtccgcaactggttctgatgatgtgagagtaatgaccagaaagagtatggatgatccaggcaggcctcctggtattgtgcttagtgctgccacttccttctggattccagttcaatccaagaggatgtttgatttccttagggatgagaatcatcgaagtgagtgggatatcctttcgaacggcggcgaagttcaagaaatggctcatatagctaatggacgtgatcctggaaattgcgtctctttactccgtgtcaatagcgcaaattcaagccagagcaacatgctgatattgcaagagagctgcactgattctacaggctcatatgttatttatgcaccagtggacatttcggccatgaacatagtcctaagcggtggagacccagattatgttgccctgcttccatcaggttttgctatactccctgatggaccaggatatggctctgcaggaattcttgatgttgggtccggtggctctctactgactgttgcatttcagatattagttgattcagtcccaacagcaaaactttcgctcggatcagtagcaactgtaaacagtctaattaagtgcacagttgaaaggattaaggctgcagtaatgtgtgacaatgcctga

SEQ ID NO: 517 - protein, 706 aa, Populus trichocarpa
MTRASSKMMTMRPNRAPKLWKLSPVMTKIPVNNTPKRSVIIAIHSVKSRTWKRKHFFKECPHPDDKQRKELSRELGLEPLQVKFWFQNKRTQMKAQHERSENSILKAENERLRVENNRYKEALRNASCPNCGGPAALGEMSFDEQHLRIENVRLREEIDRISGIAAKYVGKPLSSLSNLSPHLPSRSLDLGVSNFGAQSGFVGEMFGATDLLRSVTGPTEADKSMIVEIAVAAMEELMRIAQAGEPLWIQGENNTEMLNEEEYLRTFTRGIGPKPLGMRSEASRESAVVIMNHVNLVEILMDANQWSTIFCGIVSRAMTLEVLSTGVAGNYNGALQVMTAEFQVPSPIVPTRENYFVRYCKQHTDGTWAVVDVSLDSLRPSLLSKCRRRPSGCLIQELPNGYSKVVWVEHIEVDDRSVQNIYRPLVNSGLAFGAKRWVGTLDRQCERLASSMAINIPSGDLCVITTAEGRKSMLKLAERMVMSFCTGVGASTAHAWTTLSATGSDDVRVMTRKSMDDPGRPPGIVLSAATSFWIPVQSKRMFDFLRDENHRSEWDILSNGGEVQEMAHIANGRDPGNCVSLLRVNSANSSQSNMLILQESCTDSTGSYVIYAPVDISAMNIVLSGGDPDYVALLPSGFAILPDGPGYGSAGILDVGSGGSLLTVAFQILVDSVPTAKLSLGSVATVNSLIKCTVERIKAAVMCDNA

SEQ ID NO: 518 - DNA, 2274 bp, Populus trichocarpa
atggatggtcgtggtgatatgggtctgtttggggaacattttgatccttgtttggtagggaggatcaaggaggatggttatgagagcaggtctggtagtgataacattgaaggagcatctggtgaagatcaggatgttggagacgatcaaaggcctaggaagaagtacaacagacacactgctaatcaaatacaagagcttgaatctttcttcaaggagtgtcctcatcctgatgagaaacaaagatcagagcttagcaggaggcttggcttggaaagcaagcaaatcaagttttggtttcaaaataggagaactcaaatgaagacccaattggaacggcatgagaatgtaatcctcaggcaagataatgataaactccgacttgagaatgagttgttgaaacaaaacatgagtgatccaatttgcaacaattgtggtggtcctgtggtgcctggtccagtgtctgatgagcaacagcagttaaggatcgaaaatgctcgattgacggatgaattaggtcgtgtttgtgccttggccaataagtttttaggcagacccctcacatcctcagccaatcctatccctccgtttagcacaaactccaagttggaccttgcagttgggataaatggatatggcaatttaggccatacagacaacatgttgccaatggggcttgataataatagagggattatgatgcctctgatgaaaccaataggcaatgctgttggcaaggaagtaccacatgatagatcaatatttgtagatcttgcacttgctgctatggatgaattgataaagatggctcagattgaaagtcccatttggatcaaaagcttagatggaggaaaggaagtcctgaaccatgaggagtatacgaggacttttcctcgcattggcatgaaacccagcaattttgttactgaggctacacgggtgagtggtgtagtactcgtcaacatctcggctctagttgagacattgatggacgtgaatggatgggtggagatgtttcccagcttgattgctagagctgccaccactgatatcatatcaagtggcatgggtggaacaaaaagtggagctttgcaaatgatacacgccgagtttcaattgatttcgccttttgtccctgtgcgtcaagtgaagttccttcggttatgcaagcaactcacggagggtgtgtgggctgtagttgatgtttccattgatgcaaaccaggaaaatctaaatgcacaagcccctgtaacctgcaagaggcttccttctggctgcattatacaagatatgaacaatggttgctctaagctgtttactcttgttgtccgtgaggttacatgggtggaacattccgaatatgatgagagtgcagtccatcaactctaccgacccatacttagttctggcaggggctttggtgcacagaggtggcttgctgcccttcaacggtattacgagggcatggcaatgattatgtctcctagcattttgggtgaagatcagacagtgataaatctgggaggtaagaaaagcatgttaaagttagcacgacgaatggtggataacttctgttctggggtttgtgcttcttctttgcacaattggggcaaccttgtggctggaaatgtgagtgaagatgtgaggattttgacccgaaagagtattaatgaacctggtgagccagatggtattgtgttgagtgctgcgacttctgtttggctgccagtttcacgacaaaggttatttgacttcttgagggatgaacaatcaaggagccattgggacattttatccaatggtggaatgttgcaggagattatccaaatccccaagggacagggacaatgcaaccgtgtctctctcctgcgttcaactgtggctgttgatgctgatgcgggtgagaacaacatgttaatattacaagaaaccaggaatgatgtctcaggttcgcaagtagtgtatgcaccagtcgacatacaatcgatgagtgtagtgacgtctggtggagactctacctatgtggctctcctgccatcagggtttgtgattcttccagataattcatttagtaatggtgagcccagcaacagcgatgggaatccagtcaaaagagatagcgatagcaacaatggaggtggatcgttttttactgtcggattccaaattttggcgagcaaccttccttcagccaaacttacagtcgagtcagtcgagacgattcataatctcatctcctgcacaatgcagaggatcagaacagccttcaactaa

SEQ ID NO: 519 - protein, 757 aa, Populus trichocarpa
MDGRGDMGLFGEHFDPCLVGRIKEDGYESRSGSDNIEGASGEDQDVGDDQRPRKKYNRHTANQIQELESFFKECPHPDEKQRSELSRRLGLESKQIKFWFQNRRTQMKTQLERHENVILRQDNDKLRLENELLKQNMSDPICNNCGGPVVPGPVSDEQQQLRIENARLTDELGRVCALANKFLGRPLTSSANPIPPFSTNSKLDLAVGINGYGNLGHTDNMLPMGLDNNRGIMMPLMKPIGNAVGKEVPHDRSIFVDLALAAMDELIKMAQIESPIWIKSLDGGKEVLNHEEYTRTFPRIGMKPSNFVTEATRVSGVVLVNISALVETLMDVNGWVEMFPSLIARAATTDIISSGMGGTKSGALQMIHAEFQLISPFVPVRQVKFLRLCKQLTEGVWAVVDVSIDANQENLNAQAPVTCKRLPSGCIIQDMNNGCSKLFTLVVREVTWVEHSEYDESAVHQLYRPILSSGRGFGAQRWLAALQRYYEGMAMIMSPSILGEDQTVINLGGKKSMLKLARRMVDNFCSGVCASSLHNWGNLVAGNVSEDVRILTRKSINEPGEPDGIVLSAATSVWLPVSRQRLFDFLRDEQSRSHWDILSNGGMLQEIIQIPKGQGQCNRVSLLRSTVAVDADAGENNMLILQETRNDVSGSQVVYAPVDIQSMSVVTSGGDSTYVALLPSGFVILPDNSFSNGEPSNSDGNPVKRDSDSNNGGGSFFTVGFQILASNLPSAKLTVESVETIHNLISCTMQRIRTAFN

SEQ ID NO: 520 - DNA, 2397 bp, Populus trichocarpa
atgcccactggtgcaatagttcagcctcgccttgtctctccttctatcactaaatccatgttcaactctcctggactctcactggctcttcaacaaccaaacatagatggtcaaggagatataactagaatgtctgagaactttgagacaagtgtgggtaggagaagccgagaagaagaacatgagagcagatctggtagtgataacatggatggtgcttctggtgatgaccaagatgcagctgataatcctccaagaaaaaagagataccaccgacacaccccacaacaaatccaagaacttgaagctttgtttaaggagtgtcctcatcctgatgagaaacaaagattggagcttagtagaaggctgtgcttggagaccaggcaagtgaagttctggtttcaaaatcgtcgaacccaaatgaagactcaattggagcgccatgagaactcattactcaggcaagagaacgacaagcttcgagcggaaaacatgtccataagagatgctatgagaaatccaatgtgctcaaactgtggtggtcctgcaataattggtgatatttcacttgaagaacagcatctgaggattgagaatgctaggttaaaagatgaactagatcgagtttgtgcgcttgctggcaagttcttaggtcgccccatatcttcgttggcttcttcacttggccctccgatgccaaattcaagcttggagcttggtgttggtagtaatggttttgctggtttaagcactgtagctacaacattgcctttgggacctgattttgtaggtgggatttctggtgctttgcctgtactaactcaaactagaccagcgacaactggtgttactgggattggtagatcactggagagatccatgttcttggagttggctttggctgccatggatgaattggttaagatggctcagactgatgagcctctttggatcaggagcttcgatggtggtagggaaatattgaaccatgaggagtacttgagaactatcactccttgcattggaatgaagcctagtggctttgttagtgaggcttcgagagagactgggatggtaatcatcaacagtttggccctagttgagacactgatggattcaaaccgatgggcagaaatgtttccttgcgtgattgccaggacctctacaactgatgtgatagccaatggaatggggggaactagaaatggttcacttcaattgatgcacgcggagctccaagtcttatcccctttggttcctgttcgtgaggtcaattttctccgattttgcaagcagcacgccgagggggtttgggctgttgttgatgtgtccgtcgataccatcagagaaacttctggtgcgtcaccgacattcgtgaactgtaggaggcttccttctggctgtgtggtgcaagatatgcccaatgggtactctaaggttacatggattgagcatgcagaatatgatgaaagccaaacacaccagctctatcggccgttgataagttccggcatgggctttggggcccaacgatggatagccactctccaacgccaaagcgagtgcctagccattctcatgtcctctaatgtacccagtcgagaccacacaggtgttgatgtagctataactgcaagtggtcgccgaagcatgctgaagctggcgcaaagaatgacggctaacttctgtgccggggtttgtgcctcaacagtgcacaaatggaacaagctaaatgcaggaaatgtcgatgaagatgttagggttatgaccagaaagagcgttgatgatcctggtgagccaccaggcattgttttgagcgctgccacctctgtctggctacctgtttctccacagagactctttgatttcctccgcgatgaacggctcagaagcgaatgggacatcctctccaacggcggaccaatgcaggaaatggcccacattgccaaaggccaagatcatggcaactgtgtctccctcctacgggctagcgccatgaatgctaaccagagtagcatgttgatactgcaagagacttgcatagatgcagcagggtcacttgtagtgtacgctcccgttgacattccggccatgcacgtggtgatgaatggtggcgattcagcctacgtagcgcttcttccgtcaggtttcgctatcgtaccagatgggcccggttcacgtgggcccccaacaacaaacggtggcccaactgctaataataatagcaatggtggtggcccagagagggtgagtgggtccctcttgacggtggcgttccaaatattggtgaatagtcttcctacagccaagctcacggtagaatcggtggagacagtcaacaacctcatttcatgcactgtccagaagatcaaggcagctctgcagtgtgaaagctga

SEQ ID NO: 521 - protein, 798 aa, Populus trichocarpa
MPTGAIVQPRLVSPSITKSMFNSPGLSLALQQPNIDGQGDITRMSENFETSVGRRSREEEHESRSGSDNMDGASGDDQDAADNPPRKKRYHRHTPQQIQELEALFKECPHPDEKQRLELSRRLCLETRQVKFWFQNRRTQMKTQLERHENSLLRQENDKLRAENMSIRDAMRNPMCSNCGGPAIIGDISLEEQHLRIENARLKDELDRVCALAGKFLGRPISSLASSLGPPMPNSSLELGVGSNGFAGLSTVATTLPLGPDFVGGISGALPVLTQTRPATTGVTGIGRSLERSMFLELALAAMDELVKMAQTDEPLWIRSFDGGREILNHEEYLRTITPCIGMKPSGFVSEASRETGMVIINSLALVETLMDSNRWAEMFPCVIARTSTTDVIANGMGGTRNGSLQLMHAELQVLSPLVPVREVNFLRFCKQHAEGVWAVVDVSVDTIRETSGASPTFVNCRRLPSGCVVQDMPNGYSKVTWIEHAEYDESQTHQLYRPLISSGMGFGAQRWIATLQRQSECLAILMSSNVPSRDHTGVDVAITASGRRSMLKLAQRMTANFCAGVCASTVHKWNKLNAGNVDEDVRVMTRKSVDDPGEPPGIVLSAATSVWLPVSPQRLFDFLRDERLRSEWDILSNGGPMQEMAHIAKGQDHGNCVSLLRASAMNANQSSMLILQETCIDAAGSLVVYAPVDIPAMHVVMNGGDSAYVALLPSGFAIVPDGPGSRGPPTTNGGPTANNNSNGGGPERVSGSLLTVAFQILVNSLPTAKLTVESVETVNNLISCTVQKIKAALQCES

SEQ ID NO: 522 - DNA, 2124 bp, Populus trichocarpa
atggagcttcaattgggaaacaatggaggtgtttctggtgatgaacatgaagcttttaactctggaaataagggaaagaaggcttaccatcgccatacttgtcaacagattctgcagcttgaaaaatttttcaaggaatgtccacatccgaatgaaaaacagcggcgtcagttgagcagggaactaggccttgaggctaaacagatcaagttctggtttcaaaacagaaggacgcaggaaaaggcgcaaagtgagcgatcagataattcagttcttcggacagaaaatgagaggattcattgtgaaaatctttctatcagagaggcaatgaaaaacgtgatttgcccagcttgtggaggacaccctttcggagaagaagaacgccaacttaatttgcagaaactgaggcaggaaaatgctagattgagagaagaggctatatccagccttcttgccaagtatattggaaaaccaaagtcacagattgatttgttgacgtctgacactggatcttcacaagaagaactgccaacatttgtccagaatcaaaggatgggaaaccctggtattgattggggacggaatccaggatcggacattagtcatttcgcatatagacttgaaggaattccagatatggaaaatgcactcatggctgagactgctgccggcgcaatggatgagttgatcagacttttgcgagtaaatgagcctttttggatcaagtctccatctgacggaagactcatccttgatcggctcagttatgagagaatttaccccagggccgctcatttcataagtcgcaatgctcgtgtcgaatcatccaaggattcggcaacagtgaccatgcctggaatggacttggttgacatgtttttggatcctaataaatgggtggatctttttccgacaattgttaccgaagcaagaacaattcacgtacttgaagctggaacagtagggaaccgtcatggttcgttgcagatgatgtatgaacaaatgcacatactatcacccttggttccgcctagggaattttacttccttcgcctttgtctgcaacttgaacctgggcaatgggtgatagcagatgtatcttatgactacttgaaagaaagcggatcccctccctgcgcttggcggcttccttctggatgcatgatccaagacatgcctaatggatgttccaagataatatgggtagaacatgtggaagcgaatgataggattcaaactcactgcctgtaccgagatctcatatgtggtagttatgcttatggggcagaaagatggattgctagtctccagaggatttgtgagaggctcgctttctctacagctgtgcctccacgagaactcggaggagtggtcacttcccctgagggtagaaagagcatagtaaacctagcccacaggatggtgaagattttctgttcaagtttgggtatgtcaggaaaactggatttccgtcaattgtctgaagggaacaatagtggagttcgggtggctatttgtaagaatgcagaacaaggccagccgattggcacagttgccagtgctgctacttctttttggcttccactctcacctcagaacgtgtttaacttcttcaaagccgagaaatcgcgaactcagtgggatattctgtcgaatggcaatcctgtgcttgagatttcacacatttctaatggggctgatccagggaactgcatctccattattcgacctttcattcctgctgagaacaacatgctgatactgcaagagagctgcacagactcctcggtatcaatggtagtatacgctccagtaggcattccagccatgaacgtggcgataagcggtgatgactcatcaatcattcccatacttccatcaggttttgtaatatctggcgacggccgtatggacacaagagggaccagttctagttccaccagttctactgggtcaaactcaggaggttcactccttacaatagccttccaaattctggtctctggctctaattcctcatcctccacagaattcaacatggaatctgtggcaacagtgaataccctcatcagcaccactgttctgaaaattaaatctgcttttaattgctcagatttggattaa

SEQ ID NO: 523 - protein, 707 aa, Populus trichocarpa
MELQLGNNGGVSGDEHEAFNSGNKGKKAYHRHTCQQILQLEKFFKECPHPNEKQRRQLSRELGLEAKQIKFWFQNRRTQEKAQSERSDNSVLRTENERIHCENLSIREAMKNVICPACGGHPFGEEERQLNLQKLRQENARLREEAISSLLAKYIGKPKSQIDLLTSDTGSSQEELPTFVQNQRMGNPGIDWGRNPGSDISHFAYRLEGIPDMENALMAETAAGAMDELIRLLRVNEPFWIKSPSDGRLILDRLSYERIYPRAAHFISRNARVESSKDSATVTMPGMDLVDMFLDPNKWVDLFPTIVTEARTIHVLEAGTVGNRHGSLQMMYEQMHILSPLVPPREFYFLRLCLQLEPGQWVIADVSYDYLKESGSPPCAWRLPSGCMIQDMPNGCSKIIWVEHVEANDRIQTHCLYRDLICGSYAYGAERWIASLQRICERLAFSTAVPPRELGGVVTSPEGRKSIVNLAHRMVKIFCSSLGMSGKLDFRQLSEGNNSGVRVAICKNAEQGQPIGTVASAATSFWLPLSPQNVFNFFKAEKSRTQWDILSNGNPVLEISHISNGADPGNCISIIRPFIPAENNMLILQESCTDSSVSMVVYAPVGIPAMNVAISGDDSSIIPILPSGFVISGDGRMDTRGTSSSSTSSTGSNSGGSLLTIAFQILVSGSNSSSSTEFNMESVATVNTLISTTVLKIKSAFNCSDLD

SEQ ID NO: 524 - DNA, 2277 bp, Populus trichocarpa
atgccagcgggaatgatgattccggcaagaaacatgccatctatgattggggttaatggaaatgctggtgggtttggatcgtcttcaggacttgctcttggtcagccaaacatgatggaaggtcagcttcaccgtctagacatgacacaaaacacacctgaaggcgacatggctcggatcagagatgatgaatttgatagtaccaacactaaatcaggcagtgagaaccaagatggtgcatccggtgatgatcaagatccacgccccaaaaagaagcgttatcatcgccacactcagcatcagatccaagaaatggaagctttcttcaaagagtgtccacacccagatgacaagcaaaggaaggagttaagccgagaattagggttagagccattgcaagtcaaattttggttccaaaataagcgcacccaaatgaagacccagcatgagcgccatgaaaacacacagcttcgaaatgagaatgaaaagcttagggctgacaacatgcggtacagagaagctcttagcaatgcctcgtgtcctaattgtggagggcctactgccattggagaaatgtcctttgatgaacatcatttgagactggaaaatgccagattaagagaagagattgaccgtatttcagcaatcgctgctaagtatgttggcaagcctgtggtgaactatccacttatatcggctccgatgcctccacgtccacttgaccttggtgttgggaattttggtggacagccaggcattggaggggagatttatggagctggagacctacttaggtcgataactgctcctactgaggctgataagcccatgataattgagcttgcagttgcagccatggaggagctagttagaatggcccaaatggatgaacccttatggatgggtagccttgatggaacaaatgcagtattagatgaagatgaatacgtaaggatatttcctcgtggtattgggcctaaacctactggttttaaatgtgaggcttcaagagagtctgctgttgttatcatgaaccacatcaaccttgttgagtatctcatggatgtgaatcagtggtctacattgttttccggcatagtctcaagggctttgactttggaagtgttatcaacaggagttgcagggaactataatggtgccttgcaagtgatgacggctgaatttcaacttccaactccacttgttcctacccgagaaagttactttgtgaggtactgtaaacaacatgccgatggtacttgggcagtggttgatgtttcattggacaatttacgccctagtccgggagctaggtgtcgaaggaggccatctggatgtttgattcaagaaatgcttaatggatactccaaggttacatgggttgaacatgtagaggtggatgatagaggtgttcataatctatacaagcaacttgttagctcaggacatgcattcggggcaaaacgatgggtggcaaccctagatcggcaatgcgagcgccttgccagtgccatggcaacaaatattcctgctggcgatgttggtgtgattactaatcaagaagggagaaagagtatgatgaagctggcagagagaatggtgataagcttctgtgctggagtgagcgcctctactgctcatacttggactacactatctggaactggagctgatgatgttagggtcatgacaaggaagagtgtagatgatccagggaggcctcctgggattgtgcttagtgctgcaacttccttctggcttccagttcctccaaaaagggtttttgattttcttcgtgacgagagcactcgaaatgagtgggatattctatcaaatggtggagttgtccaagaaatggcacacattgctaatggccgggatacaggcaattgtgtatctctacttcgagttaatagcgcgaattcgagccagagcaacatgctgattttacaagagagttgcgctgatcaaacagcctctttcgtaatctatgcaccggttgatattgttgcaatgaacgtcgtacttaatggaggcgatccagactatgtagcacttcttccttcagggtttgctgttcttcccgatggaactggagcgcatgtaggaggcatggaggaggctgcaggtggatctcttctaactgttgcattccagattttggttgattcagttcctacagcaaaactatctctcggctcagtggcaactgttaacaacttgattgcctgcaccgtggagaggattaaggcttctttatcatgcgaatctgcatga

SEQ ID NO: 525 - protein, 758 aa, Populus trichocarpa
MPAGMMIPARNMPSMIGVNGNAGGFGSSSGLALGQPNMMEGQLHRLDMTQNTPEGDMARIRDDEFDSTNTKSGSENQDGASGDDQDPRPKKKRYHRHTQHQIQEMEAFFKECPHPDDKQRKELSRELGLEPLQVKFWFQNKRTQMKTQHERHENTQLRNENEKLRADNMRYREALSNASCPNCGGPTAIGEMSFDEHHLRLENARLREEIDRISAIAAKYVGKPVVNYPLISAPMPPRPLDLGVGNFGGQPGIGGEIYGAGDLLRSITAPTEADKPMIIELAVAAMEELVRMAQMDEPLWMGSLDGTNAVLDEDEYVRIFPRGIGPKPTGFKCEASRESAVVIMNHINLVEYLMDVNQWSTLFSGIVSRALTLEVLSTGVAGNYNGALQVMTAEFQLPTPLVPTRESYFVRYCKQHADGTWAVVDVSLDNLRPSPGARCRRRPSGCLIQEMLNGYSKVTWVEHVEVDDRGVHNLYKQLVSSGHAFGAKRWVATLDRQCERLASAMATNIPAGDVGVITNQEGRKSMMKLAERMVISFCAGVSASTAHTWTTLSGTGADDVRVMTRKSVDDPGRPPGIVLSAATSFWLPVPPKRVFDFLRDESTRNEWDILSNGGVVQEMAHIANGRDTGNCVSLLRVNSANSSQSNMLILQESCADQTASFVIYAPVDIVAMNVVLNGGDPDYVALLPSGFAVLPDGTGAHVGGMEEAAGGSLLTVAFQILVDSVPTAKLSLGSVATVNNLIACTVERIKASLSCESA

SEQ ID NO: 526 - DNA, 2163 bp, Populus trichocarpa
atgttcgatagccaccatatgcttgatatgactcccaaaagctctgaaaatgacttgagcaagctcaaagatgatgactatgagaccaaatccggcaccgaaactatggaagctccctccggtgatgatcaggatcccagcggccaacgccccaaaaagaagcgttatcatcgccatacgcagcgtcaaatccaagaaatggaagctttcttccaggaatgccctcatccggacgacaagcagcggaaggagctcagccgcgagctagggctggatccattgcaagtaaaattttggttccaaaacaagcgtactcaaatgaaggcgcaacatgaacgcagtgagaattcaattctcaaggctgagaatgaaaagcttcgtatggagaacaataggtacaaggaagccctaagcagtgcctcatgccctaactgtggtggtccagctgctcttggtgagatgtcttttgatgagcagcatttgaggattgagaatgctcgtcttagagaagagattgacaggatatctggaattgctgccaagtatgttggcaagcctttgtcttctctttccaacctttctcatcatttaccatcccgatctcttgatctcggagttagcaattatggggcacattcgggcttcgtaggggagatgtttggagctactgctctccttggagcagttactggacctactgaggcagataaaccaatgatagttgaagtcgcggttgcggcaatggaggaactaatgagaatggctcaggctggagaacccttgtggattcaaggagagaacaataccgaggttctcaatgaagaggaatatttgagaactttcactaggggaattggaccaagacctttaggaatgagatctgaagcttcaagggaatccgcagttgttatcatgagtcatgttaatcttgttgaaattctcatggatgcgaatcaatggtcaactattttctgtggtattgtatcaagagcaatgaccctggaagtcctatcaacaggagtggcagggaactataatggagcattgcaagtgatgacagctgagttccaggtcccttccccacttgttcctactagagaaaattactttgtgaggtactgtaaacagcataccgatgcgacttgggcagtggtagacgtttctttggacagtttatgccctagtctgatgtctaaatgtagaagaaggtcatcaggttgcttgatccaagaattgccaaatggttattccaatgtcgtttgggttgagcacactgaagtggacgacaggtctgttcacaatatatacagacccctggttaattctggtcttgcttttggagcaaagcgttgggtgggaacattagatcgacaatgcgaacgtcttgcaagttcaatggccattaacattccaactggagatctatgtgtgataacaacccctgaagggaggaaaagtattctgaagctggctgagagaatggtgatgagcttttgcactggagttggtgcttctactgcacatacttggacaacattgtctgcaactggttctgatgatgtgagagtaatgactcgaaagagtatggatgatccaggcaggcctccaggtattgtgctcagcgcagcgacttccttctggattcctgttccatccaagaaggtgtttgatttccttaaggatgagaaccatcgaagtgagtgggatatcctttcaaatggtggccaggttcaagaaatggctcatattgctaatggacgtgatcccgggaactgtgtctcattgctccgtgtcaatagtacaaattcaagccagagcaacatgctgatcttacaagagagctgcactgattctacaggctcatatgtgatttatgcaccagtggacatttcggccatgaatatagtcctaagtggtggagacccagattatgttgctctgcttccatcaggttttgctattctccctgatggaccaggatatggccctgcaggaattcttgatgtcgggtctggcggctctctgttgactgttgcatttcagatattagtggattcagtcccatcagtgaaactttcgcttggatcagtagcaactgtaaacagtctaattaagtgcacagttgaaaggattaaggctgcagtaatgtgtgacaatccttga

SEQ ID NO: 527 - protein, 720 aa, Populus trichocarpa
MFDSHHMLDMTPKSSENDLSKLKDDDYETKSGTETMEAPSGDDQDPSGQRPKKKRYHRHTQRQIQEMEAFFQECPHPDDKQRKELSRELGLDPLQVKFWFQNKRTQMKAQHERSENSILKAENEKLRMENNRYKEALSSASCPNCGGPAALGEMSFDEQHLRIENARLREEIDRISGIAAKYVGKPLSSLSNLSHHLPSRSLDLGVSNYGAHSGFVGEMFGATALLGAVTGPTEADKPMIVEVAVAAMEELMRMAQAGEPLWIQGENNTEVLNEEEYLRTFTRGIGPRPLGMRSEASRESAVVIMSHVNLVEILMDANQWSTIFCGIVSRAMTLEVLSTGVAGNYNGALQVMTAEFQVPSPLVPTRENYFVRYCKQHTDATWAVVDVSLDSLCPSLMSKCRRRSSGCLIQELPNGYSNVVWVEHTEVDDRSVHNIYRPLVNSGLAFGAKRWVGTLDRQCERLASSMAINIPTGDLCVITTPEGRKSILKLAERMVMSFCTGVGASTAHTWTTLSATGSDDVRVMTRKSMDDPGRPPGIVLSAATSFWIPVPSKKVFDFLKDENHRSEWDILSNGGQVQEMAHIANGRDPGNCVSLLRVNSTNSSQSNMLILQESCTDSTGSYVIYAPVDISAMNIVLSGGDPDYVALLPSGFAILPDGPGYGPAGILDVGSGGSLLTVAFQILVDSVPSVKLSLGSVATVNSLIKCTVERIKAAVMCDNP

SEQ ID NO: 528 - DNA, 2466 bp, Solanum lycopersicum
atgaattttgggggttttcttgataataattctggtggtggcggtgcaagaattgttgctgatataccatttaatcacaacaacagcagcagcaacaacgacaataaaaacaatatgcccactggtgcaatttctcagccaagacttcttcctcaatctcttgccaagaacatgttcaactccccaggactttctcttgctcttcaaacaggtatggaagggcaaagtgaggtaacaagaatggctgaaaactacgagggaaataacagtgttggtagaaggagtagagaagaagaaccagacagcagatctggaagtgataacttggaaggtgcatcgggtgatgaacaagatgctaccgacaaaccaccaaggaagaaaagataccaccgacacactcctcagcaaatccaagaacttgaatctcttttcaaggagtgtcctcatcctgatgagaaacaaaggttggagttaagcaaaaggctttctttggagactagacaagtcaagttttggttccaaaatcgtagaactcagatgaagactcaactggaacgccatgagaattcgatactaaggcaagagaatgataagcttcgtgcagaaaacatgtctataagagaggcaatgagaaatccaatttgtactaattgtggtggtccagcaatgattggtgagatctctcttgaggagcaacatcttaggattgaaaatgctaggctgaaagatgaattagatcgagtttgtgcacttgctggcaagtttttggggcgacccatttcatctttagtaacctctatgcctcccccaatgcctaattcaagtttggaacttggagttggaagtaatggatttggtggtatgagtaatgtaccaacaacactccccttagcacctcctgatttcggtgttgggatttcaaattctttaccagttgtgccttcaactagacagtcaactggaattgagagatcacttgaaagatccatgtatcttgaacttgctttggctgccatggaggaattggtaaaaatggcacaaactgatgaacctctttggttcaggagcattgaaggtggtagagaaatacttaaccatgaagagtacataaggacatttactccttgcattggtatgagaccaaacagttttatttcagaggcttccagggagacaggcatggttataatcaatagtttagctcttgttgagacattaatggactctaacaaatgggcagaaatgtttccatgtttgattgctagaacctcaacaacagatgttatatcaagtggtatgggtggaaccagaaatggtgcacttcagctgatgcatgctgaactccaagtgctttcaccattagtaccaattagagaggtcaatttcctgcgtttctgcaaacaacatgctgaaggtgtctgggctgtcgttgatgtatcgattgataccatccgtgaaacttctggtgcaccaacgtttccaaatagcagaaggcttccttctggctgtgttgttcaagatatgcccaatggctacagcaaagttacatgggtagaacatgccgaatatgaagagggtgcaaatcaccatctttaccggcagttaattagcgcgggtatggggtttggcgcacaaagatgggttgcaaccctccaacgccagtgtgagtgtcttgcaattctcatgtcatccaccgtgtctgccagggatcatacagcaataactccaagtgggaggcgtagcatgttgaagctagcacaacgcatgacaaacaacttttgtgctggtgtttgtgcttcaacggtacacaagtggaacaaactttgtgcaggtaatgttgatgaagatgtacgtgtcatgactcgaaagagcgtcgatgaccctggtgaaccagcagggatcgtcttaagcgctgctacttccgtttggttgcccgtttcccctcaaagactctttgatttcctccgtgacgaacgcctccgtagcgaatgggatatcctatccaacggtggccctatgcaagaaatggctcatattgccaaaggccaagatcatggcaactgcgtctctctccttcgtgctagtgctatgaacgcgaatcagagcagcatgttgatacttcatgagacttgcatagacgcggctggggcgcttgttgtatacgcgccagttgatattccggcaatgcacgtggtgatgaacggtggaaattcggcttacgtggctttgcttccttcgggattctcaattgtacccgacggcccaggatctcgtgggtccaatgggccttcatgtaatgggggcccagatcaaagaattagcgggtcactcttgacggtagcctttcagatattggtgaatagtcttcctacagccaagcttactgtggaatcagtggaaacagtcaataatcttatatcatgcactgttcagaagattaaagctgcacttcaatgcgaaagctaa

SEQ ID NO: 529 - protein, 821 aa, Solanum lycopersicum
MNFGGFLDNNSGGGGARIVADIPFNHNNSSSNNDNKNNMPTGAISQPRLLPQSLAKNMFNSPGLSLALQTGMEGQSEVTRMAENYEGNNSVGRRSREEEPDSRSGSDNLEGASGDEQDATDKPPRKKRYHRHTPQQIQELESLFKECPHPDEKQRLELSKRLSLETRQVKFWFQNRRTQMKTQLERHENSILRQENDKLRAENMSIREAMRNPICTNCGGPAMIGEISLEEQHLRIENARLKDELDRVCALAGKFLGRPISSLVTSMPPPMPNSSLELGVGSNGFGGMSNVPTTLPLAPPDFGVGISNSLPVVPSTRQSTGIERSLERSMYLELALAAMEELVKMAQTDEPLWFRSIEGGREILNHEEYIRTFTPCIGMRPNSFISEASRETGMVIINSLALVETLMDSNKWAEMFPCLIARTSTTDVISSGMGGTRNGALQLMHAELQVLSPLVPIREVNFLRFCKQHAEGVWAVVDVSIDTIRETSGAPTFPNSRRLPSGCVVQDMPNGYSKVTWVEHAEYEEGANHHLYRQLISAGMGFGAQRWVATLQRQCECLAILMSSTVSARDHTAITPSGRRSMLKLAQRMTNNFCAGVCASTVHKWNKLCAGNVDEDVRVMTRKSVDDPGEPAGIVLSAATSVWLPVSPQRLFDFLRDERLRSEWDILSNGGPMQEMAHIAKGQDHGNCVSLLRASAMNANQSSMLILHETCIDAAGALVVYAPVDIPAMHVVMNGGNSAYVALLPSGFSIVPDGPGSRGSNGPSCNGGPDQRISGSLLTVAFQILVNSLPTAKLTVESVETVNNLISCTVQKIKAALQCES

SEQ ID NO: 530 - DNA, 945 bp, Populus trichocarpa
atggcgggtggtaccggtggttctaattccaatttgtctgttttgcttcaaagccaaagaggcccttgtgctgcttcacaacctcttgaatcttttttcctttctggctcttctccttcttttcttggttcaagatccatgatgagttttgaagatgttcatcaagcaaacggatcaaccaggccttttttccgctcgtttgatcacgaagacaatggagacgatgatctggatgaatattttcatcaacctgaaaagaagaggagacttactgttgatcaagttcagtttcttgaaaagagttttgagcttgagaacaagcttgaacctgaaaggaaaatccagcttgcaaaggatcttggccttcagccgcgtcaggttgctatatggtttcaaaaccgccgagcaagatggaagactaaacagctggaaaaggattatgacgttctgcaatctagctacaatagccttaaggctgactatgacaacctcctcaaggagaaggagaaactaaaagctgaggttaatcttctcaccgacaagttgctcctcaaagagaaagagaagggaagctcagaattgtctgataaagatgcattatcgcaagagccacctaaaagggctatagctgattcagcttccgagggtgaagtgtcgaaaatctcaacagtggcctgtaagcagggagatatcagctcagccaaaagcgacatatttgattcagacagcccacattacgctgatggggtgcattcctcactcttagaggcaggagattcttcatatgttttcgaacccgatcaatcagatttgtcacaagatgaagaagataactttagcaagagcttattgcctccatacgtctttccgaagcttgaagatgacgattactctgacccgcctgcaagttttgaaggtcatgccttttggtcctggtcatactaa

SEQ ID NO: 531 - protein, 314 aa, Populus trichocarpa
MAGGTGGSNSNLSVLLQSQRGPCAASQPLESFFLSGSSPSFLGSRSMMSFEDVHQANGSTRPFFRSFDHEDNGDDDLDEYFHQPEKKRRLTVDQVQFLEKSFELENKLEPERKIQLAKDLGLQPRQVAIWFQNRRARWKTKQLEKDYDVLQSSYNSLKADYDNLLKEKEKLKAEVNLLTDKLLLKEKEKGSSELSDKDALSQEPPKRAIADSASEGEVSKISTVACKQGDISSAKSDIFDSDSPHYADGVHSSLLEAGDSSYVFEPDQSDLSQDEEDNFSKSLLPPYVFPKLEDDDYSDPPASFEGHAFWSWSY

SEQ ID NO: 532 - DNA, 1137 bp, Triticum aestivum
  misc_feature (9)..(9): n is a, c, g, or t
  misc_feature (16)..(16): n is a, c, g, or t
atgtacggngttactncgacccacgcgtccgtccaactgatgcgcgcggagctgcaggtgctgtcgccgctggtaccgatcagggaggtgacgttcctgcgcttctgcaagcagcacgccgacgggctgtgggccatcgtggacgtgtcggtggacggcgtcctccgccccgactccggcaccggcgccggcccggcagggtacatgggctgccgcctcctcccctccggctgcatcgtcgaggacatgcagaacggctacgccaaggtcacgtgggtggttcacgccgagtacgacgaggcggcggtgcacgagctgtaccgcccgctgctccgctccggccaggccctgggcgcgcgccgctggctcgcctcgctgcagcgccagtgcgagtaccacgccatcctctgctccaacccgcaccccaaccacggcgaccgccacgaggccatctcgccggcgggccgccggtgcatgctcaggctggcgcagcggatggccgacaacttctgcgccggcgtctgcgccacggccgcccagaagtggcgccgcctcgacgagtggcgcgtcgagggcgctggcggacgggacccggccggcggggaggacaaggtgcgcatgatggccaggcagagcgtgggcgcgcctggcgagccccccggcgtcgtgctcagcgctaccacttccgtgcggctccccggcacgctgccgcagcgcgtcttcgactacctccgcgacgagcagcgccgcggagagtgggacatcctcgccaacggcgaggccatgcaggagatggaccacatcgccaagggccagcaccacgggcaacgccgtctccctcctccgtccaaacgcgacgagcgggaaccagaaacacatgctcatcctgcaggagacgtgcaccgacgcgtccggctcgctggtggtgtacgcgccggtggacgtgcagtcaatgcacgtcgtcatgggcggcggggactcggcctacgtctcactgctgccctcggggttcgcatcctcccgagggcaacaacagccggccacgggaatgaccttctcccagggtcgtgcccatggccatgcgggaggagaacaaaaccccggtctgcccgtaccggggcctcaaatatctggtaa

SEQ ID NO: 533 - protein, 378 aa, Triticum aestivum
  misc_feature (6)..(6): Xaa can be any naturally occurring amino acid
MYGVTXTHASVQLMRAELQVLSPLVPIREVTFLRFCKQHADGLWAIVDVSVDGVLRPDSGTGAGPAGYMGCRLLPSGCIVEDMQNGYAKVTWVVHAEYDEAAVHELYRPLLRSGQALGARRWLASLQRQCEYHAILCSNPHPNHGDRHEAISPAGRRCMLRLAQRMADNFCAGVCATAAQKWRRLDEWRVEGAGGRDPAGGEDKVRMMARQSVGAPGEPPGVVLSATTSVRLPGTLPQRVFDYLRDEQRRGEWDILANGEAMQEMDHIAKGQHHGQRRLPPPSKRDEREPETHAHPAGDVHRRVRLAGGVRAGGRAVNARRHGRRGLGLRLTAALGVRILPRATTAGHGNDLLPGSCPWPCGRRTKPRSARTGASNIW

SEQ ID NO: 534 - DNA, 2229 bp, Zea mays
atggggcgcggcggcggcggggtgtccgacccgctgctgggcgacgagttcgagagcaagtccggcagcgagaacgtggacggcggcgtctccgtggacgagctgcaggaccccaaccagcggcccagcaagaagaagcgctaccaccgccacacccagcaccagatccaggagttggaagctttcttcaaggagtgcccgcacccggacgacaagcagcgcaaggagctgagccgggagctggggctggagcccctccaggtcaagttctggttccagaacaagcgcacgcaaatgaagaaccatcacgagcggcaggagaactcgcagctgaggtccgagaacgagaagctgcgcgccgagaacatgcggtacaaggaggccctgagcagcgcgtcgtgccccagctgcggcgggccggccgcgctcggcgagatgtccttcgacgagcaccacctccgcgtggagaacgcgcggctgcgggaggaggtcgacaggatctcctccatcgccgccaagtacgtgggcaggcccatggtgcccttccccgtgctgtccagcccgctggccggggccggggcacgcgcccccgcgttgccgccgctggacatggcgccgccgtatggcgctgccgctgacatgttcggcggcggcggtgtcgtcgctgctgctggtgctgccggtgccggggacctgctgctgaggggcgccgccgtgcagtcggacgccgacaagcctatgatcgtggagctggccgtggcggccatggaggagctggttcggatggcgcagctggacgagccgctgtggaacgcgcccgcggggctcgatgggtccgctgaggaggagacgcttaacgaggaggagtacgcgcgcttgttccccggcgggctcgggcccaagccgtacgggctcaactcggaggcgtcgcgtgacagcgccgtcgtcatcatgacccatgccaacctcgtcgaaatcctcatggacgtgaaccagtatgcggccgtgttctcgagtatcgtgtcgagagccgcgacgctggaggtgctatcaaccggcgtggctgggaactacaatggtgcattgcaagtgatgtcggtggagtttcaggtgccttccccactggtgccgaccagggaaagctacttcgtgaggtactgcaagcagaacgccgacggaacatgggccgtcgtcgacgtctcgctggacggcctgcgccccggcgcagtcctcaagtgccggcgccggccgtcgggatgcctgatccaggaaatgcccaatggctactcgaaggtgacctgggtggagcacgtcgaggtggacgacaggtcggtgcacagcatctacaagctgctggtgagctcggggctggccttcggtgcacgccgatgggttgggacgctggaccgccagtgcgagcgccttgccagtgtcatggccagcaacatcccgaccagcgacatcggtgtgatcactagcgcggaggggaggaagagcatgctgaagctggcggagaggatggtgatgagcttctgcggcggcgtgacggcctctgcggcgcaccagtggacaacgctgtccggcagcggcgctgaggacgtccgcgtcatgaccaggaagagcgtcgacgaccctggcaggccgcccggcatagtcctcaacgctgccacctcgttctggctccccgtcccgcccaagcgtgtcttcgacttcctccgtgacgaaagctctcgcagcgagtgggacatcctctccaatggcggcgttgttcaagagatggctcacatcgccaacggccgcgaccatggaaactgcgtctcgcttcttcgtgtcaatagcacgaactcgaaccaaagcagcatgctgatcctccaggagagctgcaccgacatgtcgggctcgtacgtcatctacgccccggtggatgtggtcgccatgaacgtggtcctcaacggcggcgaccctgactacgtggcgctcctgccctctggcttcgcgatcctgcccgacggcccatcgtcagggagcagcagcatgctgcaaggcgacggcggcgtcggctcaggtgggtcgctcctgacggtggccttccagatactcgtcgactctgtccccaccgccaagatctcgctggggtcggtggccacggtgaacagcctcatcgcctgcaccgtggagcgcatcaaggcggcggtgatctccggccagagcaatccccagcagcagtag

SEQ ID NO: 535 - protein, 742 aa, Zea mays
MGRGGGGVSDPLLGDEFESKSGSENVDGGVSVDELQDPNQRPSKKKRYHRHTQHQIQELEAFFKECPHPDDKQRKELSRELGLEPLQVKFWFQNKRTQMKNHHERQENSQLRSENEKLRAENMRYKEALSSASCPSCGGPAALGEMSFDEHHLRVENARLREEVDRISSIAAKYVGRPMVPFPVLSSPLAGAGARAPALPPLDMAPPYGAAADMFGGGGVVAAAGAAGAGDLLLRGAAVQSDADKPMIVELAVAAMEELVRMAQLDEPLWNAPAGLDGSAEEETLNEEEYARLFPGGLGPKPYGLNSEASRDSAVVIMTHANLVEILMDVNQYAAVFSSIVSRAATLEVLSTGVAGNYNGALQVMSVEFQVPSPLVPTRESYFVRYCKQNADGTWAVVDVSLDGLRPGAVLKCRRRPSGCLIQEMPNGYSKVTWVEHVEVDDRSVHSIYKLLVSSGLAFGARRWVGTLDRQCERLASVMASNIPTSDIGVITSAEGRKSMLKLAERMVMSFCGGVTASAAHQWTTLSGSGAEDVRVMTRKSVDDPGRPPGIVLNAATSFWLPVPPKRVFDFLRDESSRSEWDILSNGGVVQEMAHIANGRDHGNCVSLLRVNSTNSNQSSMLILQESCTDMSGSYVIYAPVDVVAMNVVLNGGDPDYVALLPSGFAILPDGPSSGSSSMLQGDGGVGSGGSLLTVAFQILVDSVPTAKISLGSVATVNSLIACTVERIKAAVISGQSNPQQQ

SEQ ID NO: 536 - DNA, 2592 bp, Zea mays
atggcaaatgccgcttgtgtgggcggaagctttttgggagtagaaaagggaaagcctgccactgtcagcaacctaggcgctcctgcagtcctgctgctggttcttgcctgtctcccgcttgttctccctagttccgacccgaagcagggaatgagcttcggcgatctcgacggcggcgggtccgcggccggcttgcagtacccgtacggcgccttcgcgtcatcgccggtcctctcgctcaccgtggtggacgccaggcgccgccgcggcggcggcgggaacgcgaaggacgcgtcggaggcggagaacgagggacagtcgatgatgagcggacacctcgacgtcgtcctgtctggcggcggcgatggcgaggacggcgaggccgcgaaccagcgcaagcccaagcgcaagaagccgtacaaccgccacacgccgcggcagatcgaacagctcgaagcgatgttcaaggaattccaccacccggacgagaagcagcgcgcgcagctgagcaggcagctgggcctggacccgcggcaggtcaagttctggttccagaaccggcgcacgcatttgaagtgcttgacatggctttcgcttttgcatggtcctgaacttggcaagaaccaactggagcggcaggagaacgcgaggctgaaacacgagaacgacaaactgcgcgtcgagaacctgtccatccgggaggccataagggacctggtgtgcagctgctgtggcggtccagcggtgctcggggagctgtcgcccgaagagcaccagctgcgcctcgagaatgcgaggctcagggacgagctcgctcgagtctgcaccgtcacttccaagttcattggcaagcccatgtctcacatggaactgctgctcgcgaaggagccgcatcctatgacaggctcgtcactggaacttgcagttgctgttggtgttggttccagcgtgccatcgagcaaaatgcctgtctcgacgatctccgagttggccggcagcacatccagctcaacgggaacagtgaccacgcccatggtgactgcatccttgccgatggttagcattgacaagtccaagttcgcccagcttgcagtgagtgcgatgaatgagcttgtcaagatggcgcggatgaatgaaccgctgtggattccaaccattccctcacctggctcaccaatcatggagactctaaactttaaagagtacttgaaggcattctcaccatgtgttggagtgaagcctactgggtttgtgtctgaggcctctagggaatccggcattgtcaccattgacagtagcgctgctcttatggaggtcttcatggatgaggttcttcttgtgcctccttgctcgttgtttttgctattgcctagacgatggtcagacatattctactgcattgttgccaaggcatcaatcgttgaggagatcttacctggtgttgcaggaagcagaaatggtgcattgctgcttatgcaggcagaactacaaatgctttcacctcttgtccctataagggaggttacatttctcaggttctgcaaacagcttgctgagggtgcatgggctgtagtggatgtttccattgatggactgcagacggatcagtgcctagctacaaacacgaaatgccggaggctgccttcaggttgcgtgttgcaagatacccccaatggctgcaaggtcacatgggttgagcatgcagaatatcctgaggcgtccgtgcaccagctctaccagcctcttatgcgctctggcctcgcccttggcgcagggcggtggcttgcaacactgcaacgccagtgtgagtgcttggccatcctcatgtcatcgcttgcagcgccagagcatgactcagcagcggtttctctggaaggaaaatggagcctgttgaagttggcacggaggatgatggagaacttctgcgcagggatgggcgcgtcatcttcccgcgaatggagtatgctggatggctttacaggtagcacggggaaagacgtgcgggtcatggtgcagaacagtgtggatgaacctggggtgccaccgggtgtggtgcttagcgtcgccacagcagtatggctacctgtgacccctgagcggctcttcaacttccttcgcgacgaggagctccgtgctgagtgggacatcctcagcaatggtggccctatgcagcaggtgctacgcatttccaagggccaactggacggcaactctgtcgctctgctgagagctgatcatacagactcccacctgaacagcatcttgattctacaagagacgtgcactgacagatctggcgcaatggtcgtgtacaccccggtggacttcccggcaatgcagcttgtgcttggtggaggggactcgaagaacgtggcgctcttaccatctggtttcgtcattctgcctgctgggtctaccgccagtgggctcgggcacaaggcacgcggatcgctgctcacagttgcattccagatcctcgtgaacagccagcccacagcaaagctgacggtggagtcagtggacaccgtgtacagcctcatctcctgtaccatcgagaagatcaaggcggcacttcactgtgacgtctgttaa

SEQ ID NO: 537 - protein, 863 aa, Zea mays
MANAACVGGSFLGVEKGKPATVSNLGAPAVLLLVLACLPLVLPSSDPKQGMSFGDLDGGGSAAGLQYPYGAFASSPVLSLTVVDARRRRGGGGNAKDASEAENEGQSMMSGHLDVVLSGGGDGEDGEAANQRKPKRKKPYNRHTPRQIEQLEAMFKEFHHPDEKQRAQLSRQLGLDPRQVKFWFQNRRTHLKCLTWLSLLHGPELGKNQLERQENARLKHENDKLRVENLSIREAIRDLVCSCCGGPAVLGELSPEEHQLRLENARLRDELARVCTVTSKFIGKPMSHMELLLAKEPHPMTGSSLELAVAVGVGSSVPSSKMPVSTISELAGSTSSSTGTVTTPMVTASLPMVSIDKSKFAQLAVSAMNELVKMARMNEPLWIPTIPSPGSPIMETLNFKEYLKAFSPCVGVKPTGFVSEASRESGIVTIDSSAALMEVFMDEVLLVPPCSLFLLLPRRWSDIFYCIVAKASIVEEILPGVAGSRNGALLLMQAELQMLSPLVPIREVTFLRFCKQLAEGAWAVVDVSIDGLQTDQCLATNTKCRRLPSGCVLQDTPNGCKVTWVEHAEYPEASVHQLYQPLMRSGLALGAGRWLATLQRQCECLAILMSSLAAPEHDSAAVSLEGKWSLLKLARRMMENFCAGMGASSSREWSMLDGFTGSTGKDVRVMVQNSVDEPGVPPGVVLSVATAVWLPVTPERLFNFLRDEELRAEWDILSNGGPMQQVLRISKGQLDGNSVALLRADHTDSHLNSILILQETCTDRSGAMVVYTPVDFPAMQLVLGGGDSKNVALLPSGFVILPAGSTASGLGHKARGSLLTVAFQILVNSQPTAKLTVESVDTVYSLISCTIEKIKAALHCDVC

SEQ ID NO: 538 - DNA, 2592 bp, Zea mays
atgagcttcggcggcatgttcgacggcgccggctccggcgtcttctcctacgacgctaccggcggcggcacgggcatgcacaaccccggccgcctcgtcccggccccgcccctgccgaaacctggcggattcggcgccacgggtctctccctcgggctgcaaacgaacatggaaggggctcagctgggcgacttgggtcgtatgggcctgattggcggcggcgggagcgggagcggaggcgacggggactcgctgggccgcggccgtgaggacgagatcgacagccggtcaggcagcgacaacgtcgacggcgcctccggtgacgagatcgacccggacaacagtaaccctcgcaggaagaagaagcgataccaccgccacacaccgcagcaaatccaagaactcgaagctgtgttcaaggagtgcccccaccccgacgagaagcaaaggatggagctcagcaagcggctcaacctagagagccgccaggtcaagttctggttccagaaccgccgcacgcagatgaagacgcagatcgagcggcacgagaacgcgctgctgaggcaggagaacgacaagctgagggcggagaacatgacgatccgggaggcgatgcgcaaccccatctgcgccaactgtggcggcgcggccgtgctcggggaggtgtcgctggaggagcagcacctccgcatagagaacgcgcggctcaaggacgagctggaccgcgtctgcgccctcgccggcaagttcctcggccgcccaatctcctctggcagctccatgtcgtcgtccctgcaaggctgctccggcctcgagctcgccgtcggctccaacaacggctacgggcccggtcccctcggcgcgtcagcgctgcagcccctccccgacctactcggcgccggccttccgggccccgtgggctcggccgccatgcgcttgcccatgggcattggcgccctcgacgttgcgctgcacggggcggccgccgacggcatcgaccgcaccgtcctcctcgagctggcgctcgccgcgatggaggagctcatgaaagtggcgcagatggacgagccgctctggctccgcagtcccgacggcagcggcttggaggcgctcaacctcgacgagtaccaccgagcgttcgccagggtgttcgggccgagccccgcgggctacgtcaccgaggctacccgcgaggccggcgtcgccataaccagcagcgtagacctcgtagacagcctcatggacgcggctcggtggtcggagatgttcccgtgcatcgtggcgagggcgagcacgacggacatcatctcgagcggcatgggcggcacgcgcagcgggtcaatccagctgatgcacgcggagctgcaggtgctgtcgccgctggtgccgatccgtgaggtggtgttccttcggttctgcaagcagcacgccgaggggctgtgggccgtggtcgacgtctcggtggacgccatcctccggcccgacggcggccaccaccacgcgcagaacggcggcggcgccgggtacatgggctgccgcctgctccccaccggctgcatcgtgcaagacatgaacaacggctactccaaggtcacgtgggttgtccacgcggagtacgacgaggcggtggtgcaccaactctaccgcccgctgctccagtccggccaggcccttggcgcgcgccgctggctcgcctcgctccagcgccagtgccagtacctcgccatcctctgctccaactctctccctgcccgcgaccacgccgcgatcacgccggtggggcggaggagcatgctgaagctggcgcagcggatgacggacaacttctgcgccggtgtgtgtgcgtcggcggcgcagaagtggcggcgcctggacgagtggcgcagcggcgagggaggagacgctgctgggaacggcggatcagcagccgcgggcgagggcgaggagaaggtgcggatgatggcgcggcacagcgtgggggcgcccggggatccccccggcgtggtgctcagcgccaccacgtcggtgcggctgcccgccacgtccccgcagcgcgtgttcgactacctccgcgacgagcagcgccgcggcgagtgggacatcctggccaacggtgaggcaatgcaggagatggaccacatcgccaagggccagcaccacggcaacgccgtctccctcctccgcccaaatgcaactagtggcaaccaaaacaacatgctcatcctgcaagagacctgcaccgacccgtcaggctctctggtggtgtacgccccggtggacgtgcagtccatgcacgtcgtcatgaacggtggcgactccgcctacgtctctctcctcccctctgggttcgccatcctcccggacggccactgccagtcaccaaacactgcacatcagggttcaccaagctgcggcggtagcagcagcagcagcagcacggggtctctagtcacggtggcattccagatcctggtgaacaacctgcccaccgcgaagctcaccgtggagtcggtggagaccgtcagcaacctgctctcctgcaccatccagaagatcaagtctgcgctccaggccagcatcgtcacgccctag

SEQ ID NO: 539 - protein, 863 aa, Zea mays
MSFGGMFDGAGSGVFSYDATGGGTGMHNPGRLVPAPPLPKPGGFGATGLSLGLQTNMEGAQLGDLGRMGLIGGGGSGSGGDGDSLGRGREDEIDSRSGSDNVDGASGDEIDPDNSNPRRKKKRYHRHTPQQIQELEAVFKECPHPDEKQRMELSKRLNLESRQVKFWFQNRRTQMKTQIERHENALLRQENDKLRAENMTIREAMRNPICANCGGAAVLGEVSLEEQHLRIENARLKDELDRVCALAGKFLGRPISSGSSMSSSLQGCSGLELAVGSNNGYGPGPLGASALQPLPDLLGAGLPGPVGSAAMRLPMGIGALDVALHGAAADGIDRTVLLELALAAMEELMKVAQMDEPLWLRSPDGSGLEALNLDEYHRAFARVFGPSPAGYVTEATREAGVAITSSVDLVDSLMDAARWSEMFPCIVARASTTDIISSGMGGTRSGSIQLMHAELQVLSPLVPIREVVFLRFCKQHAEGLWAVVDVSVDAILRPDGGHHHAQNGGGAGYMGCRLLPTGCIVQDMNNGYSKVTWVVHAEYDEAVVHQLYRPLLQSGQALGARRWLASLQRQCQYLAILCSNSLPARDHAAITPVGRRSMLKLAQRMTDNFCAGVCASAAQKWRRLDEWRSGEGGDAAGNGGSAAAGEGEEKVRMMARHSVGAPGDPPGVVLSATTSVRLPATSPQRVFDYLRDEQRRGEWDILANGEAMQEMDHIAKGQHHGNAVSLLRPNATSGNQNNMLILQETCTDPSGSLVVYAPVDVQSMHVVMNGGDSAYVSLLPSGFAILPDGHCQSPNTAHQGSPSCGGSSSSSSTGSLVTVAFQILVNNLPTAKLTVESVETVSNLLSCTIQKIKSALQASIVTP

SEQ ID NO: 540 - DNA, 2310 bp, Zea mays
atgctgcagaacatgatggatgggcaccatcagctcgctatgatgcagcagcagcatcagaaccacggccagcagcaggcagccacgagcgagagcgacgcgcgaggcccgcgccacgacgagctgctgatggagagcaagtccggcagcgacaacatggagggaggcgcccggtcaggcggctccggcggtgaggagctgcaggaggaggatctcggcctgcggcagccggcccgcaagaagcgctaccaccgccacacccagcaccagatccaggagctcgaagcgttcttcaaggagtacccgcaccctgacgacaagcagaggaaggagctgagccgggagctgggcctggagcctctccaggtcaagttctggttccagaacaagcgtacccagatgaagacgcagcaggaacggcacgagaacatgcagctgcgggcggagaacgagaagctgcgcgccgagaacgcgcggtacaaggacgcgctcgccaacgcctcgtgcccgagctgcggcggcccggcggccacggccgtcatcggcgagatgtccttcgacgagcaccacctccgcgtcgagaacgcgcgcctccgcgacgaggtcgaccgcatctccaccatcgccgccaagtacgtcggcaagcccgctggcagcctgctgctgctgccccccaacaacctgtcaaacaacgtctccggcccggcgctttcctcccaccaccacctcctgcccggcggaacagacgtgttcggtggcctccaccgtcatgctggcggtgggtttgactttgacaaggggttggttgtcgagctcgccgtcgccgccatggaggagctggtgcggatggctctgctcggcgagccgctctggatccctgcccttgccgtagacggggctaccaccgagactctcaacgaggaagagtacgcccgcgggttcttccccaggggcgttggtcccaagctgccggagctccggtcggaagcgtcgcgggaggccgtcgtggtcatcatgaaccacgtcagcctcatcgagatgctcatggacgtgaaccagtggtcgacgctgttctcaagcatcgtgtcacgggctgccaccctcgaggtgctctccaccggcgtcgccggcaactacaatggcgcgctgcagctgatgacggcggagttccagatgccgtcgccgctggtgccgacacgtgagtgccagttcctgcgctactgcaagcagcacacggacggcagctgggcggtggtggacgtgtccgtcgagggccagctgctacgtaccggcagcagacaggggcgcgggcgcggtcgacgccggccctcaggctgcctgatccaggagatgccgaacggctactcgagggtgacgtgggtggagcacgcggaggcggacgacatgatggtgcacgacctgtaccgccccctagtctgctccggcctggcgttcggcgcgcggcggtgggcatcgacgctggagcggcagtgcgagcggctcgccagcgccatggccagcggcgtcgtcgtgccggcggcagcagcagggccagccgcgggcgtggtgacgtcgccggaggggcgccgcagcatgatgcggctggcggagcgcatggtggcgagcttctgcggcggcgtgacggcgtcgacgacgcaccagtggaccacgctgtcgggcagcggcgcggaggacgtgcgcgtgatgacgcgcaagagcgtggacgacccgggccggccgccgggcatcatcctcaacgccgccacctccttctggctccccgtggcccccgcgcgcgtcttcggcttcctccgggacgacgccacccgcagcgagtgggacatgctctccaacggcggcgacgtgcaggagatggcccacattgccaacggccgcgaccacggcaacgctgtctcgctgctccgcgtcgataacgccaactcgaaccagggcaacatgctgatcctgcaggagtgctgcacggacgcgacggggtcgtacgtgatctacgcgccggtggacgtggtggccatgaacgtggtgctcaacggcggggacccggactacgtggcgctgctgccgtcagggttcgccatcctccccgacggcggtggcggtggcggtggcgggtcgctcctcaccgtggcgttccagatcctggtcgactcggtgcccaccgccaagctgtccctgggctccgtcgccaccgtcaacagcctcatcgcctgcaccgtcgagcgcatcaaggctgccgtcgccgccgacaacgccggtgtggcggcggcggcggcggcgacgtcccaccattga

SEQ ID NO: 541 - protein, 769 aa, Zea mays
MLQNMMDGHHQLAMMQQQHQNHGQQQAATSESDARGPRHDELLMESKSGSDNMEGGARSGGSGGEELQEEDLGLRQPARKKRYHRHTQHQIQELEAFFKEYPHPDDKQRKELSRELGLEPLQVKFWFQNKRTQMKTQQERHENMQLRAENEKLRAENARYKDALANASCPSCGGPAATAVIGEMSFDEHHLRVENARLRDEVDRISTIAAKYVGKPAGSLLLLPPNNLSNNVSGPALSSHHHLLPGGTDVFGGLHRHAGGGFDFDKGLVVELAVAAMEELVRMALLGEPLWIPALAVDGATTETLNEEEYARGFFPRGVGPKLPELRSEASREAVVVIMNHVSLIEMLMDVNQWSTLFSSIVSRAATLEVLSTGVAGNYNGALQLMTAEFQMPSPLVPTRECQFLRYCKQHTDGSWAVVDVSVEGQLLRTGSRQGRGRGRRRPSGCLIQEMPNGYSRVTWVEHAEADDMMVHDLYRPLVCSGLAFGARRWASTLERQCERLASAMASGVVVPAAAAGPAAGVVTSPEGRRSMMRLAERMVASFCGGVTASTTHQWTTLSGSGAEDVRVMTRKSVDDPGRPPGIILNAATSFWLPVAPARVFGFLRDDATRSEWDMLSNGGDVQEMAHIANGRDHGNAVSLLRVDNANSNQGNMLILQECCTDATGSYVIYAPVDVVAMNVVLNGGDPDYVALLPSGFAILPDGGGGGGGGSLLTVAFQILVDSVPTAKLSLGSVATVNSLIACTVERIKAAVAADNAGVAAAAAATSHH

SEQ ID NO: 542 - DNA, 2388 bp, Zea mays
atgatgatcccggcgaggcacatgccgccgacgatgatcgtccggaacggcggcgcggcgtacgggtcctcgtcggcactgtcgctcggccagccgaacttgatggacaaccagcagctccagttccagcaagcgttgcagcagcagcacctgctgctggaccagatcccggcgacgacggcggagagctgcgacaacacggggcgcggcggtggtggccgggggtccgacccactggccgacgagttcgagagcaagtccggcagcgagaacgtggacggcgtctccgtggacgaccaggacgaccccaaccagcggcccagcaagaagaagcgctaccaccgccacaccctgcatcagatccaggagatggaagctttcttcaaggaatgcccgcacccggacgacaagcagcgcaaggagctgagtcgggagctgggtctggtacccctccaggtcaagttctggttccagaacaagcgcacgcaaatgaagaaccagcacgagcggcaggagaactcgcagctgagggcggagaacgagaagctgcgcgcggagaacatgcggtacaaggaggccctcagcagcgcgtcctgccccaactgcggcgggccggccgcgctcggcgagatgtccttcgacgagcaccacctccgcgtcgagaacgcgcggctccgggaggagatcgacaggatctccgccatcgccgccaagtacgtgggcaagcccatggtgtccttccccgtgctgtccagcccgctcgctggggcgcgtccgtcgccgctggacatcgacagcggtggcgtactggggggtgctgccacttatggcggcgccgctgacatcttcggcggcggcggcggcgtcgctgcttgtggtgcggccagggattgtgacaagcctatgattgtggagctggctgtgacggccatggaggagctggttcggatggcgcagctggacgagccgctgtggaacgcgccggcaggcgggcacgacgggtctgctgagacgctgaacgaggaggagtacgcgcgcatgttcgtccctgctggagggctcgggctaaaaaagcagtacgggttcaagtcggaggcgtcgcgcgacagctccgtcgtcatcatgacccatgccagcctcgtcgagatcctcatggacgtgaatcagtatgcgacggtgttctcgagcatcgtgtcgagagctgcgacgctggaggtgctgtccaccggcgtggctgggaactacaatggcgcattgcaagtgatgtcggttgagtttcaggtgccttccccactggtgccgactagggatagctatttcgtgaggtactgcaagcagaacgcggatggaacatgggccgtcgtcgacgtctcgctggacaccagctcagtcctcaagtgccggcgccggccgtcgggatgcctgatccaggaaatgcccaatggctactcaaaggtgacctgggtggaacacgtcgaggtggatgacaggtcggtaaacggcatctacaaactgctggtggactcagggctcgccttcggtgcacgccgatgggtcggaacgctggaccgccagtgcgagcgccttgccagtgtcatggccagcaacattccgaccagtgacatcggcgtgatcactagcacggaggggaggaagagcatgctgaagctggctgagaggatggtgacgagcttctgcggtggcgtgacggcctcagccgcgcaccagtggacgacgctgtccggcagtggtgctgacgacgtccgtgtcatgaccaggaagagcgtcgacgaccctggcaggccgccgggcatagtcctcaatgctgccacctctttctggctccctatcacacccaagcgtgtcttcgacttcctccgtgacgaaagctctcgcagcgagtgggacatcctctccaatggcggcgtcgttcaagaaatggctcacattgccaatggccgcgaccatggcaactgcgtctcgcttcttcgtgtcaatcagagcaccaactcgacccaaagcaacatgctgatcctgcaagagagctgcacggacgcctcgggctcgtacgtcatctatgcgccggtggacgtggtggccatgaacgtggtcctcaacggcggcgaccccgactacgtggcgctcctgccctctggcttcgccatcctgcccgacggcccgtcaggcagcagcaacatgcaaggcggtggcggtggcggcgtcggctcaggcgggtcgctcctgacggtggcgttccagatcttggtcgactccgtccccaccgccaagctctcgctggggtcggtggcgaccgtgaacagcctcatcgcccgcaccgtggagcgcatcaaggcggcggtctccggcgagagtgttacccagcagtag

SEQ ID NO: 543 - protein, 795 aa, Zea mays
MMIPARHMPPTMIVRNGGAAYGSSSALSLGQPNLMDNQQLQFQQALQQQHLLLDQIPATTAESCDNTGRGGGGRGSDPLADEFESKSGSENVDGVSVDDQDDPNQRPSKKKRYHRHTLHQIQEMEAFFKECPHPDDKQRKELSRELGLVPLQVKFWFQNKRTQMKNQHERQENSQLRAENEKLRAENMRYKEALSSASCPNCGGPAALGEMSFDEHHLRVENARLREEIDRISAIAAKYVGKPMVSFPVLSSPLAGARPSPLDIDSGGVLGGAATYGGAADIFGGGGGVAACGAARDCDKPMIVELAVTAMEELVRMAQLDEPLWNAPAGGHDGSAETLNEEEYARMFVPAGGLGLKKQYGFKSEASRDSSVVIMTHASLVEILMDVNQYATVFSSIVSRAATLEVLSTGVAGNYNGALQVMSVEFQVPSPLVPTRDSYFVRYCKQNADGTWAVVDVSLDTSSVLKCRRRPSGCLIQEMPNGYSKVTWVEHVEVDDRSVNGIYKLLVDSGLAFGARRWVGTLDRQCERLASVMASNIPTSDIGVITSTEGRKSMLKLAERMVTSFCGGVTASAAHQWTTLSGSGADDVRVMTRKSVDDPGRPPGIVLNAATSFWLPITPKRVFDFLRDESSRSEWDILSNGGVVQEMAHIANGRDHGNCVSLLRVNQSTNSTQSNMLILQESCTDASGSYVIYAPVDVVAMNVVLNGGDPDYVALLPSGFAILPDGPSGSSNMQGGGGGGVGSGGSLLTVAFQILVDSVPTAKLSLGSVATVNSLIARTVERIKAAVSGESVTQQ

SEQ ID NO: 544 - DNA, 2409 bp, Zea mays
atgactccggcaaggcgcatgccggcgatgatcggccggaataatggcgtcgcgttcgggtcctcgtcagcgctatctttaagccaggtgattattccggctgacttcctagacagccatcatctgcagcaagcgttcgagcagcaactctttgaacagatcccagccgccgcagtggatagcagcgacaacatcatccacggtcgctccgacgcgctggtggacgagtttgagagcaagtcgtgcagcgagaatcccgatggcaccgcctccggcgatgatggccagggggacgaggaccctaaccagcggccaaacaagaagaagcggtatcaccgccacacccagcaccagatcgaagagatggaggccttcttcaaggagtgtccacacccggatgacaagcagcgaaaggagctgagccgggagctcggtctcgagccgctgcaggtcaagttctggttccagaacaagcgcacacagatgaagaaccagcacgagcggcaggagaacgcgcagctgcgcgcagagaacgacaagctgcgagctgagaacatgcggtacaaggacgcgctaggcacagcgtcctgccccagctgtggcggccctgccgccctgggtgagatgtccttcgacgagcaccacctccggctcgagaacgctcgccttcgcgacgagatcgaccggatctcgggcatcgccgccaagcacgtcggcaagcccatggtctccttcccggtgctctccagcccgctcgccgcccgttccccgttcgaccttgctggtgcctacggtgtccagccgcctggtggtggtggtggcctcggcgccgctgaccacctattcggcggtgccgccggcgacctgctgcgaagcgtgtcggccgggcagctcagcgctgacaagtccatgatcgttgagctggccgtcgctgccatggacgagctcctccggatggcgcgggtcgacgcgccgctgtggaacgggggcgtggcaggggtgccgcagcagctggatgaggaggagtacggccggacgttcccgggcgggcttgggcccaggcagtacgggcttcgtccggaggcgtctcgagacgacgccgtcgtgatcatgacacgcgacagccttgtggagatactcatggacgcgaaccgatttgctgcagtgttctcaagcatcgtgtcgagggcttctacgcacgaggtgttgtcaaccggtgtggcagggagctacaatggtgcattgcaagtgatgtcaatggagttccaggtgccgtcaccgctggtaccgacacgggagagctactttgcgaggtactgcaagaacaaccccgatgggacgtgggcggtcgtcgatgtatcactcgacagcctccgccctagccccgctctcaagtgccggcgcaggccatcaggatgccttgtccaagaaatgcccaatggctactcaaaggtgacctgggttgagcatgttgaggtggacgacagatcagtgcacaatctctacaggcctttggtgaattcaggcctgggatttggtgcgacaaggtgggttggcacgctggaccgacagtgcgagcgtctcgccagtgccatggccagcaacatccccaacggcgacctcggtgtgatcacgagcatagaggggaggaagagcatgctgaagctggcagagaggatggtggcgagcttctgcggtggcgtgaccgcgtctgcggcgcatcagtggacgacgctgtcggggagcggagcggaggacgtccgcgttatgaccaggaagagcgtggacgacccaggcaggccgccgggcatcgtcctcaacgctgccacctccttctggctgcctgtcccgcccaagagggtcttcgacttcctccgcgacgagacctctcgcagcgagtgggacatcctctccaacggtggcgcagtccaagaaatggctcatattgcaaacggccgggaccatggcaactgcgtctcccttcttcgtgtcaatagcgcaaactccaaccagagcaacatgctgatcctccaggagagctgcacggacgcatcgggctcatacgtggtgtacgcgccggtggatgtggtggccatgaacgtggtgctcaacggcggcgacccggactacgtggccctgctgccgtcaggcttcgccatcctccccgacggaccgccggcgccgggcatggctccccatcacggaggagagggtgctgccggcggcggcttggaggagttggaggccgccggcgggtccctcttgacggtggcgttccagatcctggtggactccgtccccaccgccaagctctcgctgggctctgtagccacggtgaacagcctcatcgcctgcaccgtggagcgcatcaaagctgccgtctgcggcgctgaaggcaacccacagtag

SEQ ID NO: 545 - protein, 802 aa, Zea mays
MTPARRMPAMIGRNNGVAFGSSSALSLSQVIIPADFLDSHHLQQAFEQQLFEQIPAAAVDSSDNIIHGRSDALVDEFESKSCSENPDGTASGDDGQGDEDPNQRPNKKKRYHRHTQHQIEEMEAFFKECPHPDDKQRKELSRELGLEPLQVKFWFQNKRTQMKNQHERQENAQLRAENDKLRAENMRYKDALGTASCPSCGGPAALGEMSFDEHHLRLENARLRDEIDRISGIAAKHVGKPMVSFPVLSSPLAARSPFDLAGAYGVQPPGGGGGLGAADHLFGGAAGDLLRSVSAGQLSADKSMIVELAVAAMDELLRMARVDAPLWNGGVAGVPQQLDEEEYGRTFPGGLGPRQYGLRPEASRDDAVVIMTRDSLVEILMDANRFAAVFSSIVSRASTHEVLSTGVAGSYNGALQVMSMEFQVPSPLVPTRESYFARYCKNNPDGTWAVVDVSLDSLRPSPALKCRRRPSGCLVQEMPNGYSKVTWVEHVEVDDRSVHNLYRPLVNSGLGFGATRWVGTLDRQCERLASAMASNIPNGDLGVITSIEGRKSMLKLAERMVASFCGGVTASAAHQWTTLSGSGAEDVRVMTRKSVDDPGRPPGIVLNAATSFWLPVPPKRVFDFLRDETSRSEWDILSNGGAVQEMAHIANGRDHGNCVSLLRVNSANSNQSNMLILQESCTDASGSYVVYAPVDVVAMNVVLNGGDPDYVALLPSGFAILPDGPPAPGMAPHHGGEGAAGGGLEELEAAGGSLLTVAFQILVDSVPTAKLSLGSVATVNSLIACTVERIKAAVCGAEGNPQ

SEQ ID NO: 546 - DNA, 2109 bp, Zea mays
atgagcttcgggagcctattcgacggcgggtccggcggcggcggaggaggaggagggatgcagttcccgttctcgaccgggttctcgtcctcgccggccctctccctcggtctggagaaccccggcggcggcatggtcggccggatgctccccgtgggcggcgcccccgcggccggcgggatggcgagggacgccgccgacgccgagaacgacagccgctccgggagcgaccacctggacgccatgtccgccggcgccggcgccgaggacgaggacgacgctgagccgggcaacccgcgcaagcgcaagaagcgctaccaccgccacacgccgcagcagatccaggagctcgaagcgctgttcaaggagtgccctcacccggacgagaagcagcgcggcgagctcagcaagaggctcggcctcgacccgcgccaggtcaagttctggttccagaaccgccgcacgcagatgaagacgcaactggagcggcacgagaacgcgcttctcaagcaagagaacgacaagctgcgggccgagaacatggcgatccgggaggcgatgcgcagcccgatgtgcggcagctgcgggagccccgccatgctcggggaggtgtccctggaggagcagcacctgtgcatcgagaatgcgcggctcaaggacgagctcaaccgcgtctacgccctcgccaccaagttcctcggcaagcccatgcccgtcctctcggggcccatgctgcagccgaacctgtcgctgcccatgccgagctcgtcgctggagctggcagtaggcggcctccgtggcctagggtctatcccttccttggacgagtttgctggcggtgtgtctagcccgttgggcacggtgatcacgcctgcacgggcgaccggatctgctccgccgcctatggtgggcgtcgacaggtccatgctgctggagcttgcgatcagcgccatggatgaactagttaagctggcacaggttgacgagcccttgtggcttcccagcctcagtggctctcccgacaagaagctgctcaactttgaggagtatgcccactcgttctctccgtccgtcggcgccgtgaagcctgtgggctatgtatccgaggcctctagggagtctggcctcgtcatcattgacaacagccttgctcttgtagagacccttatggacgtgagacggtggtctgatatgttctcgtgcatgattgctaaggccacagtcctagaggaggtgacatctggcattgcaggaagtaggaatggtgcgctgctgctgatgaaggctgagctacaggtgctctcacctctagtgcccatcagggaggtcacatttctcaggttttgcaagcagctggctgagggtgcatgggcagtagtggatgtgtccattgacggattggtgagagatcacaactctggaacagcatccaacgccggaaatatacggtgcaggaggttgccttctggctgtgtgatgcaggacactcccaatggctactgcaaggtcacatgggtagagtatacggaatacgacgaggcgtcagtacaccagctctatagaccactcatccggtccgggctggcctttggggccaggcggtggcttgcaatgctgcagcgccagtgcgaatgcctggccatactcatgtcccctgatacagtttcagctaatgactcgtcagtcataacacaggagggcaagcgaagcatgctgaagctggcacggcggatgacggagaacttctgcgccggggtcagcgcgtcatctgcacgtgaatggagtaagctggacggcgctgcaggcagcatcggggaggatgtgcgggtcatggcacggaaaagcgtggacgagcctggggagccgccgggcgtggtcctaagcgcagccacatcggtgtgggtgcccgtggctccggagaagctcttcaacttcctccgtgacgagcagctgcgtgcggagtgggacatcctcagcaacggaggcccgatgcaggagatggccaacatcgccaaggggcaggagcacgggaactcggtgtccctcctcagagccagccatgagtgccaaccagagcagcatgctgatcctccaggagacttgcactga

SEQ ID NO: 547 - protein, 702 aa, Zea mays
MSFGSLFDGGSGGGGGGGGMQFPFSTGFSSSPALSLGLENPGGGMVGRMLPVGGAPAAGGMARDAADAENDSRSGSDHLDAMSAGAGAEDEDDAEPGNPRKRKKRYHRHTPQQIQELEALFKECPHPDEKQRGELSKRLGLDPRQVKFWFQNRRTQMKTQLERHENALLKQENDKLRAENMAIREAMRSPMCGSCGSPAMLGEVSLEEQHLCIENARLKDELNRVYALATKFLGKPMPVLSGPMLQPNLSLPMPSSSLELAVGGLRGLGSIPSLDEFAGGVSSPLGTVITPARATGSAPPPMVGVDRSMLLELAISAMDELVKLAQVDEPLWLPSLSGSPDKKLLNFEEYAHSFSPSVGAVKPVGYVSEASRESGLVIIDNSLALVETLMDVRRWSDMFSCMIAKATVLEEVTSGIAGSRNGALLLMKAELQVLSPLVPIREVTFLRFCKQLAEGAWAVVDVSIDGLVRDHNSGTASNAGNIRCRRLPSGCVMQDTPNGYCKVTWVEYTEYDEASVHQLYRPLIRSGLAFGARRWLAMLQRQCECLAILMSPDTVSANDSSVITQEGKRSMLKLARRMTENFCAGVSASSAREWSKLDGAAGSIGEDVRVMARKSVDEPGEPPGVVLSAATSVWVPVAPEKLFNFLRDEQLRAEWDILSNGGPMQEMANIAKGQEHGNSVSLLRASHECQPEQHADPPGDLH

SEQ ID NO: 548 - DNA, 2493 bp, Zea mays
atgatgatcccggcgaggcacatgccgccgacgatgatcgtccggaacggcggcgcggcgtacgggtcctcgtcggcactgtcgctcggccagccgaacttgatggacaaccagcagctccagttccagcaagcgttgcagcagcagcacctgctgctggaccagatcccggcgacgacggcggagagctgcgacaacacggggcgcggcggtggtggccgggggtccgacccactggccgacgagttcgagagcaagtccggcagcgagaacgtggacggcgtctccgtggacgaccaggacgaccccaaccagcggcccagcaagaagaagcgctaccaccgccacaccctgcatcagatccaggagatggaagctttcttcaaggaatgcccgcacccggacgacaagcagcgcaaggagctgagtcgggagctgggtctggtacccctccaggtcaagttctggttccagaacaagcgcacgcaaatgaagaaccagcacgagcggcaggagaactcgcagctgagggcggagaacgagaagctgcgcgcggagaacatgcggtacaaggaggccctcagcagcgcgtcctgccccaactgcggcgggccggccgcgctcggcgagatgtccttcgacgagcaccacctccgcgtcgagaacgcgcggctccgggaggagatcgacaggatctccgccatcgccgccaagtacgtgggcaagcccatggtgtccttccccgtgctgtccagcccgctcgctggggcgcgtccgtcgccgctggacatcgacagcggtggcgtactggggggtgctgccacttatggcggcgccgctgacatcttcggcggcggcggcggcgtcgctgcttgtggtgcggccagggattgtgacaagcctatgattgtggagctggctgtgacggccatggaggagctggttcggatggcgcagctggacgagccgctgtggaacgcgccggcaggcgggcacgacgggtctgctgagacgctgaacgaggaggagtacgcgcgcatgttcgtccctgctggagggctcgggctaaaaaagcagtacgggttcaagtcggaggcgtcgcgcgacagctccgtcgtcatcatgacccatgccagcctcgtcgagatcctcatggacgtgaatcagtatgcgacggtgttctcgagcatcgtgtcgagagctgcgacgctggaggtgctgtccaccggcgtggctgggaactacaatggcgcattgcaagtgatgtcggttgagtttcaggtgccttccccactggtgccgactagggatagctatttcgtgaggtactgcaagcagaacgcggatggaacatgggccgtcgtcgacgtctcgctggacaccagctcagtcctcaagtgccggcgccggccgtcgggatgcctgatccaggaaatgcccaatggctactcaaaggtgacctgggtggaacacgtcgaggtggatgacaggtcggtaaacggcatctacaaactgctggtggactcagggctcgccttcggtgcacgccgatgggtcggaacgctggaccgccagtgcgagcgccttgccagtgtcatggccagcaacattccgaccagtgacatcggcgtgatcactagcacggaggggaggaagagcatgctgaagctggctgagaggatggtgacgagcttctgcggtggcgtgacggcctcagccgcgcaccagtggacgacgctgtccggcagtggtgctgacgacgtccgtgtcatgaccaggaagagcgtcgacgaccctggcaggccgccgggcatagtcctcaatgctgccacctctttctggctccctatcacacccaagcgtgtcttcgacttcctccgtgacgaaagctctcgcagcgaggcacgcacccgcgcgcccacccatacccagtttttttttaatcgagaacacgttctacctagctatgaaccgccttttctttttttcttttttctttttttgcagtgggacatcctctccaatggcggcgtcgttcaagaaatggctcacattgccaatggccgcgaccatggcaactgcgtctcgcttcttcgtgtcaatcagagcaccaactcgacccaaagcaacatgctgatcctgcaagagagctgcacggacgcctcgggctcgtacgtcatctatgcgccggtggacgtggtggccatgaacgtggtcctcaacggcggcgaccccgactacgtggcgctcctgccctctggcttcgccatcctgcccgacggcccgtcaggcagcagcaacatgcaaggcggtggcggtggcggcgtcggctcaggcgggtcgctcctgacggtggcgttccagatcttggtcgactccgtccccaccgccaagctctcgctggggtcggtggcgaccgtgaacagcctcatcgcccgcaccgtggagcgcatcaaggcggcggtctccggcgagagtgttacccagcagtag

SEQ ID NO: 549 - protein, 830 aa, Zea mays
MMIPARHMPPTMIVRNGGAAYGSSSALSLGQPNLMDNQQLQFQQALQQQHLLLDQIPATTAESCDNTGRGGGGRGSDPLADEFESKSGSENVDGVSVDDQDDPNQRPSKKKRYHRHTLHQIQEMEAFFKECPHPDDKQRKELSRELGLVPLQVKFWFQNKRTQMKNQHERQENSQLRAENEKLRAENMRYKEALSSASCPNCGGPAALGEMSFDEHHLRVENARLREEIDRISAIAAKYVGKPMVSFPVLSSPLAGARPSPLDIDSGGVLGGAATYGGAADIFGGGGGVAACGAARDCDKPMIVELAVTAMEELVRMAQLDEPLWNAPAGGHDGSAETLNEEEYARMFVPAGGLGLKKQYGFKSEASRDSSVVIMTHASLVEILMDVNQYATVFSSIVSRAATLEVLSTGVAGNYNGALQVMSVEFQVPSPLVPTRDSYFVRYCKQNADGTWAVVDVSLDTSSVLKCRRRPSGCLIQEMPNGYSKVTWVEHVEVDDRSVNGIYKLLVDSGLAFGARRWVGTLDRQCERLASVMASNIPTSDIGVITSTEGRKSMLKLAERMVTSFCGGVTASAAHQWTTLSGSGADDVRVMTRKSVDDPGRPPGIVLNAATSFWLPITPKRVFDFLRDESSRSEARTRAPTHTQFFFNREHVLPSYEPPFLFFFFLFLQWDILSNGGVVQEMAHIANGRDHGNCVSLLRVNQSTNSTQSNMLILQESCTDASGSYVIYAPVDVVAMNVVLNGGDPDYVALLPSGFAILPDGPSGSSNMQGGGGGGVGSGGSLLTVAFQILVDSVPTAKLSLGSVATVNSLIARTVERIKAAVSGESVTQQ

SEQ ID NO: 550 - DNA, 2358 bp, Zea mays
atgcgatatcaccaacgcttcgctggaagaaggcgtcgtcacagacagggatcgaaggctgacctcctagacagccatcagctgcagcaagcgttccagcagcagctcttcgatcagatcccgaccaccaccacagtggacgatagcagcgacaacctcatccatggccgctctgacacgctggtagatgagttcgagagcaagtcctgcagcgagaatcccgacggaacctctggtgacgatggcctggaggaagaccccaatcagcggccgaacaagaagaagcgataccaccgccacacccagcaccagatccaagagatggaggcgttcttcaaggagtgcccgcacccggacgacaagcagcggaaggagctgagccgggagctcggcctcgagccgctgcaggtcaagttttggttccagaacaagcgcacacagatgaagaaccagcacgagcggcacgagaacgcgcagctgcgcgcggagaacgacaagctgcgagccgagaacatgcggtacaaggaggcgctgggcacggcctcgtgccccagctgcggcggcccggctgccctcggcgagatgtccttcgacgagcaccacctccgcctcgagaacgctcgcctccgtgacgagatcgaccggatctcgggcatcgccgccaagcacgtgggaaagcccatggtgtccttccccgtgctctccagcccgctcgccgccgccgccgccgccgcccggtccccactcgacctcgccggcgcctacggcgtccagtcagctgctgcgggcctcggcgccgaccacgtgctgttcggcgccggtgccggcgatctgctgaggagcgtgtcggccgggcagctcgacgcggacaagcccatgatcgtggagctggccgtcgcggccatggacgagctcctccggatggcgcggcctgacgcgctgctgtggggtggcggcgcgtcggcaggggcgcagcagcagcagctggacgaggaggagtacgtccggacgttccccgctgggctcgggccgaggcagtacgggctccgtccggaggcgtctcgggacagcgccgtcgtgatcatgacctgcgacagcctcatcgagatactcatggacgcgaaccgattcgcggcagtgttctcgagcatcgtgtcgagggcttccacgcacgaggtgctgtcaactggtgtggcagggagctacaatggtgcattacaagtgatgtcgatggagtttcaggtgccgtcgccgctggtgccgacgcgcgagagctacttcgtgaggtactgcaagaacaacccggacgggacatgggccgtcgtcgacgtctcgctcgacagcctccgccctagcccggtcatcaaatgccggcgcaggccgtcaggttgcctcatccaagagatgcccaatggctactcaaaggtgacctgggtggagcatgttgaggtcgacgacagatcagtgcacaacctctacaggcctttggtcaattcaggcctcgcgtttggcgcgaagaggtgggttggcacactggaccggcagtgcgagcggctcgccagcgccatggccagcaacatccccaacggcgacctcggtgtgatcacaagcatagaggggaggaagagcatgctgaagctggcggagaggatggtggcgagcttctgcggcggcgtgacggcgtctgcggcgcaccagtggacgacgctgtcgggaagcggcgcggaggacgtccgtgttatgaccaggaagagcgtggacgacccgggcaggccgccgggcatcgtcctcaatgctgccacctccttctggctgcccgtcccacccaagagggtcttcgatttcctccgcgatgagacctctcgcagcgagtgggacatcctctcgaacggtggtgctgtccaagaaatggctcacattgccaacggccgggaccatggcaactgtgtctccctccttcgtgtcaatagtgcaaactcgaaccagagcaacatgctgatcctccaggagagctgcaccgacgcctcgggctcgtacgtggtgtacgcgccggtggacgtggtggcgatgaacgtggtgctcaacggcggcgacccggactacgtggccctgctgccgtcgggcttcgccatcctccccgacggaccaccgccggccggtgcggctccgtcccacggagagggcttggacactggcggcggcgggtccctcctgacggtggcgttccagatcttggtggactccgtccccaccgccaagctctccctcggctccgtagccaccgtgaacagcctcatcgcctgcaccgtcgagcgcatcaaggccgccgtctgtgcggaagccggcaacccgcagtag

SEQ ID NO: 551 - protein, 785 aa, Zea mays
MRYHQRFAGRRRRHRQGSKADLLDSHQLQQAFQQQLFDQIPTTTTVDDSSDNLIHGRSDTLVDEFESKSCSENPDGTSGDDGLEEDPNQRPNKKKRYHRHTQHQIQEMEAFFKECPHPDDKQRKELSRELGLEPLQVKFWFQNKRTQMKNQHERHENAQLRAENDKLRAENMRYKEALGTASCPSCGGPAALGEMSFDEHHLRLENARLRDEIDRISGIAAKHVGKPMVSFPVLSSPLAAAAAAARSPLDLAGAYGVQSAAAGLGADHVLFGAGAGDLLRSVSAGQLDADKPMIVELAVAAMDELLRMARPDALLWGGGASAGAQQQQLDEEEYVRTFPAGLGPRQYGLRPEASRDSAVVIMTCDSLIEILMDANRFAAVFSSIVSRASTHEVLSTGVAGSYNGALQVMSMEFQVPSPLVPTRESYFVRYCKNNPDGTWAVVDVSLDSLRPSPVIKCRRRPSGCLIQEMPNGYSKVTWVEHVEVDDRSVHNLYRPLVNSGLAFGAKRWVGTLDRQCERLASAMASNIPNGDLGVITSIEGRKSMLKLAERMVASFCGGVTASAAHQWTTLSGSGAEDVRVMTRKSVDDPGRPPGIVLNAATSFWLPVPPKRVFDFLRDETSRSEWDILSNGGAVQEMAHIANGRDHGNCVSLLRVNSANSNQSNMLILQESCTDASGSYVVYAPVDVVAMNVVLNGGDPDYVALLPSGFAILPDGPPPAGAAPSHGEGLDTGGGGSLLTVAFQILVDSVPTAKLSLGSVATVNSLIACTVERIKAAVCAEAGNPQ

SEQ ID NO: 552 - DNA, 2397 bp, Zea mays
atgactccggcaaggcgcatgccggcgatgatcggccggaataatggcgtcgcgttcgggtcctcgtcagcgctatctttaagccaggctgacttcctagacagccatcatctgcagcaagcgttcgagcagcaactctttgaacagatcccagccgccgcagtggatagcagcgacaacatcatccacggtcgctccgacgcgctggtggacgagtttgagagcaagtcgtgcagcgagaatcccgatggcaccgcctccggcgatgatggccagggggacgaggaccctaaccagcggccaaacaagaagaagcggtatcaccgccacacccagcaccagatcgaagagatggaggccttcttcaaggagtgtccacacccggatgacaagcagcgaaaggagctgagccgggagctcggtctcgagccgctgcaggtcaagttctggttccagaacaagcgcacacagatgaagaaccagcacgagcggcaggagaacgcgcagctgcgcgcagagaacgacaagctgcgagctgagaacatgcggtacaaggacgcgctaggcacagcgtcctgccccagctgtggcggccctgccgccctgggtgagatgtccttcgacgagcaccacctccggctcgagaacgctcgccttcgcgacgagatcgaccggatctcgggcatcgccgccaagcacgtcggcaagcccatggtctccttcccggtgctctccagcccgctcgccgcccgttccccgttcgaccttgctggtgcctacggtgtccagccgcctggtggtggtggtggcctcggcgccgctgaccacctattcggcggtgccgccggcgacctgctgcgaagcgtgtcggccgggcagctcagcgctgacaagtccatgatcgttgagctggccgtcgctgccatggacgagctcctccggatggcgcgggtcgacgcgccgctgtggaacgggggcgtggcaggggtgccgcagcagctggatgaggaggagtacggccggacgttcccgggcgggcttgggcccaggcagtacgggcttcgtccggaggcgtctcgagacgacgccgtcgtgatcatgacacgcgacagccttgtggagatactcatggacgcgaaccgatttgctgcagtgttctcaagcatcgtgtcgagggcttctacgcacgaggtgttgtcaaccggtgtggcagggagctacaatggtgcattgcaagtgatgtcaatggagttccaggtgccgtcaccgctggtaccgacacgggagagctactttgcgaggtactgcaagaacaaccccgatgggacgtgggcggtcgtcgatgtatcactcgacagcctccgccctagccccgctctcaagtgccggcgcaggccatcaggatgccttgtccaagaaatgcccaatggctactcaaaggtgacctgggttgagcatgttgaggtggacgacagatcagtgcacaatctctacaggcctttggtgaattcaggcctgggatttggtgcgacaaggtgggttggcacgctggaccgacagtgcgagcgtctcgccagtgccatggccagcaacatccccaacggcgacctcggtgtgatcacgagcatagaggggaggaagagcatgctgaagctggcagagaggatggtggcgagcttctgcggtggcgtgaccgcgtctgcggcgcatcagtggacgacgctgtcggggagcggagcggaggacgtccgcgttatgaccaggaagagcgtggacgacccaggcaggccgccgggcatcgtcctcaacgctgccacctccttctggctgcctgtcccgcccaagagggtcttcgacttcctccgcgacgagacctctcgcagcgagtgggacatcctctccaacggtggcgcagtccaagaaatggctcatattgcaaacggccgggaccatggcaactgcgtctcccttcttcgtgtcaatagcgcaaactccaaccagagcaacatgctgatcctccaggagagctgcacggacgcatcgggctcatacgtggtgtacgcgccggtggatgtggtggccatgaacgtggtgctcaacggcggcgacccggactacgtggccctgctgccgtcaggcttcgccatcctccccgacggaccgccggcgccgggcatggctccccatcacggaggagagggtgctgccggcggcggcttggaggagttggaggccgccggcgggtccctcttgacggtggcgttccagatcctggtggactccgtccccaccgccaagctctcgctgggctctgtagccacggtgaacagcctcatcgcctgcaccgtggagcgcatcaaagctgccgtctgcggcgctgaaggcaacccacagtag

SEQ ID NO: 553 - protein, 798 aa, Zea mays
MTPARRMPAMIGRNNGVAFGSSSALSLSQADFLDSHHLQQAFEQQLFEQIPAAAVDSSDNIIHGRSDALVDEFESKSCSENPDGTASGDDGQGDEDPNQRPNKKKRYHRHTQHQIEEMEAFFKECPHPDDKQRKELSRELGLEPLQVKFWFQNKRTQMKNQHERQENAQLRAENDKLRAENMRYKDALGTASCPSCGGPAALGEMSFDEHHLRLENARLRDEIDRISGIAAKHVGKPMVSFPVLSSPLAARSPFDLAGAYGVQPPGGGGGLGAADHLFGGAAGDLLRSVSAGQLSADKSMIVELAVAAMDELLRMARVDAPLWNGGVAGVPQQLDEEEYGRTFPGGLGPRQYGLRPEASRDDAVVIMTRDSLVEILMDANRFAAVFSSIVSRASTHEVLSTGVAGSYNGALQVMSMEFQVPSPLVPTRESYFARYCKNNPDGTWAVVDVSLDSLRPSPALKCRRRPSGCLVQEMPNGYSKVTWVEHVEVDDRSVHNLYRPLVNSGLGFGATRWVGTLDRQCERLASAMASNIPNGDLGVITSIEGRKSMLKLAERMVASFCGGVTASAAHQWTTLSGSGAEDVRVMTRKSVDDPGRPPGIVLNAATSFWLPVPPKRVFDFLRDETSRSEWDILSNGGAVQEMAHIANGRDHGNCVSLLRVNSANSNQSNMLILQESCTDASGSYVVYAPVDVVAMNVVLNGGDPDYVALLPSGFAILPDGPPAPGMAPHHGGEGAAGGGLEELEAAGGSLLTVAFQILVDSVPTAKLSLGSVATVNSLIACTVERIKAAVCGAEGNPQ

SEQ ID NO: 554 - DNA, 2253 bp, Zea mays
atggtgcacgaggggcagctgaagaacactgaaccggatatcggcgtcaacatgggagatgatgagttaatctatctgccagacatagaagaatatgatatggatgctctcatgggagacgaggaccagttgaacactgatcaggctattttttgtgaggaacacaacctcgacaaggtgtcatcgtccaagcgtcccaaacgcttcaccgtgcagcagcttcagcaacttgaatcttcgttccaaaagtgtagccatccagatgatgaaatgcgccaggaactggctgccaaggttggtataagtgcaaggcaggttaagttttggtttcaaaaccgacgctctcagattaaggtgaggtcctgtggaactgagaacaacaaatatcggcgacaaaacgctgagctgctcgcaacgaacatggaactcaaggagcaactgaaaggaatgacatgcagtagatgcgatgccccaacaataatgcagaaatggcagttgatggatgaaaatgctaagcttagggaaatgtactcgctcgccagtgcagaactgaccaagctcatgcaggaagcaaatctccctccctctgtgatactagaggatatggcattagttacttccatgaacccattgtccagcaatgctagcagcagtcgtagcaccatcaaccaggatgagcttctctcatatgttgagtgtgctatcaaagagtttgagatgctagtaagggatggtacgccgttgtggctgccgaccatcggtggcgacgtgctcaacagtaaggagtatgcctgccagagattcccaagattacatgggacgatccgcccagaagggtttgttgtggaggccacaagggacactgccatagtcaagggatcagccccagacattgttgacatcctcactgatgtgccacgatggtacaaggcgttcccttgcattgtagcagcactaagggcctaccacgtcatctttagtggaccttttgcatctggcaacgtgctaattcaggagctcctgcagataaatgtagatctatctgtggaatcacctcgcccgcctcttcgcaacatgaaatttctaaggattaccaagcagaatgcaaatggggactttgttgtagtggatgtgtcaatcaatgatgtccaaggaattcatgaacaacaaggcagccaacataagcataccatgctaccctctggttgcctcattaaagacaagggcgatggctattgtcaggtcacatggattgtccatgcagagtacgaggaggcctccgtgccacccctcttccgacagttctaccagtctgggctggcattcggtgcaagccgttggcttgcatcactccaaaggcactgtgaatacatggttgttaagcattccatccaagttccaactggttgtgtctctggctcaggggtgctcaccttgtctgctctgggtagatggaacctcctagagctggcacagcggatgatggcgatcttctacaagactacatctgggctgcccaccgtggaaccaggcaacattgtcaccaggtggggtcgtggctgcatgggcactacaggcgagatgcttgagccagctgtgcgcatggtactagggaattactttggcgccatggatgggcagccatcgcccctccaagtgctaagcgccaccacaactgtgtggctgccaggaacgcctccggagagtgtttttaactacctgtgcaatgggcaacgccgtggcgagtgggatgccttcgtctgtgccggcgcagtgcaggagttgagctcagttgccacgtgcccccaccttcatggcaatgctgtttctgttctctgccctaatgtgaccaatgcagctaacaacgccatgctgttcctgcaacagacaagcatcgatgtctcgcgcgcgctagttgtgtacagcgttgttgaagagaccatgcttcgttccgtcctggatgttagcgacgacacttcaaacttagtcctcctgccatctggattcgccatcctcccagatggccatggcagggctcaccatgccgctgcttccaactcctccagcgctcttgccggactcaacggaactgcaggatgtcttctcaccgcagcctaccaggtaccggtgccattcaacaatctccgtcatccagatgtgcaagagacctacgagaatgctggaaagcggatctgccatgcgataaagaagatcatggatgctgttggggcacctattgttgtcccaatctaa

SEQ ID NO: 555 - protein, 750 aa, Zea mays
MVHEGQLKNTEPDIGVNMGDDELIYLPDIEEYDMDALMGDEDQLNTDQAIFCEEHNLDKVSSSKRPKRFTVQQLQQLESSFQKCSHPDDEMRQELAAKVGISARQVKFWFQNRRSQIKVRSCGTENNKYRRQNAELLATNMELKEQLKGMTCSRCDAPTIMQKWQLMDENAKLREMYSLASAELTKLMQEANLPPSVILEDMALVTSMNPLSSNASSSRSTINQDELLSYVECAIKEFEMLVRDGTPLWLPTIGGDVLNSKEYACQRFPRLHGTIRPEGFVVEATRDTAIVKGSAPDIVDILTDVPRWYKAFPCIVAALRAYHVIFSGPFASGNVLIQELLQINVDLSVESPRPPLRNMKFLRITKQNANGDFVVVDVSINDVQGIHEQQGSQHKHTMLPSGCLIKDKGDGYCQVTWIVHAEYEEASVPPLFRQFYQSGLAFGASRWLASLQRHCEYMVVKHSIQVPTGCVSGSGVLTLSALGRWNLLELAQRMMAIFYKTTSGLPTVEPGNIVTRWGRGCMGTTGEMLEPAVRMVLGNYFGAMDGQPSPLQVLSATTTVWLPGTPPESVFNYLCNGQRRGEWDAFVCAGAVQELSSVATCPHLHGNAVSVLCPNVTNAANNAMLFLQQTSIDVSRALVVYSVVEETMLRSVLDVSDDTSNLVLLPSGFAILPDGHGRAHHAAASNSSSALAGLNGTAGCLLTAAYQVPVPFNNLRHPDVQETYENAGKRICHAIKKIMDAVGAPIVVPI

SEQ ID NO: 556 - DNA, 2391 bp, Zea mays
atgacgccggcaaggcgcgtgccgccggcggcgatgatcggccggaatggcttcgcgtttgggtcctcgtcggcgctgtctttaagccaggctgacctcctagacagccatcagctgcagcaagcgttccagcagcagctcttcgatcagatcccgaccaccaccacagtggacgatagcagcgacaacctcatccatggccgctctgacacgctggtagatgagttcgagagcaagtcctgcagcgagaatcccgacggaacctctggtgacgatggcctggaggaagaccccaatcagcggccgaacaagaagaagcgataccaccgccacacccagcaccagatccaagagatggaggcgttcttcaaggagtgcccgcacccggacgacaagcagcggaaggagctgagccgggagctcggcctcgagccgctgcaggtcaagttttggttccagaacaagcgcacacagatgaagaaccagcacgagcggcacgagaacgcgcagctgcgcgcggagaacgacaagctgcgagccgagaacatgcggtacaaggaggcgctgggcacggcctcgtgccccagctgcggcggcccggctgccctcggcgagatgtccttcgacgagcaccacctccgcctcgagaacgctcgcctccgtgacgagatcgaccggatctcgggcatcgccgccaagcacgtgggaaagcccatggtgtccttccccgtgctctccagcccgctcgccgccgccgccgccgccgcccggtccccactcgacctcgccggcgcctacggcgtccagtcagctgctgcgggcctcggcgccgaccacgtgctgttcggcgccggtgccggcgatctgctgaggagcgtgtcggccgggcagctcgacgcggacaagcccatgatcgtggagctggccgtcgcggccatggacgagctcctccggatggcgcggcctgacgcgctgctgtggggtggcggcgcgtcggcaggggcgcagcagcagcagctggacgaggaggagtacgtccggacgttccccgctgggctcgggccgaggcagtacgggctccgtccggaggcgtctcgggacagcgccgtcgtgatcatgacctgcgacagcctcatcgagatactcatggacgcgaaccgattcgcggcagtgttctcgagcatcgtgtcgagggcttccacgcacgaggtgctgtcaactggtgtggcagggagctacaatggtgcattacaagtgatgtcgatggagtttcaggtgccgtcgccgctggtgccgacgcgcgagagctacttcgtgaggtactgcaagaacaacccggacgggacatgggccgtcgtcgacgtctcgctcgacagcctccgccctagcccggtcatcaaatgccggcgcaggccgtcaggttgcctcatccaagagatgcccaatggctactcaaaggtgacctgggtggagcatgttgaggtcgacgacagatcagtgcacaacctctacaggcctttggtcaattcaggcctcgcgtttggcgcgaagaggtgggttggcacactggaccggcagtgcgagcggctcgccagcgccatggccagcaacatccccaacggcgacctcggtgtgatcacaagcatagaggggaggaagagcatgctgaagctggcggagaggatggtggcgagcttctgcggcggcgtgacggcgtctgcggcgcaccagtggacgacgctgtcgggaagcggcgcggaggacgtccgtgttatgaccaggaagagcgtggacgacccgggcaggccgccgggcatcgtcctcaatgctgccacctccttctggctgcccgtcccacccaagagggtcttcgatttcctccgcgatgagacctctcgcagcgagtgggacatcctctcgaacggtggtgctgtccaagaaatggctcacattgccaacggccgggaccatggcaactgtgtctccctccttcgtgtcaatagtgcaaactcgaaccagagcaacatgctgatcctccaggagagctgcaccgacgcctcgggctcgtacgtggtgtacgcgccggtggacgtggtggcgatgaacgtggtgctcaacggcggcgacccggactacgtggccctgctgccgtcgggcttcgccatcctccccgacggaccaccgccggccggtgcggctccgtcccacggagagggcttggacactggcggcggcgggtccctcctgacggtggcgttccagatcttggtggactccgtccccaccgccaagctctccctcggctccgtagccaccgtgaacagcctcatcgcctgcaccgtcgagcgcatcaaggccgccgtctgtgcggaagccggcaacccgcagtag

SEQ ID NO: 557 - protein, 796 aa, Zea mays
MTPARRVPPAAMIGRNGFAFGSSSALSLSQADLLDSHQLQQAFQQQLFDQIPTTTTVDDSSDNLIHGRSDTLVDEFESKSCSENPDGTSGDDGLEEDPNQRPNKKKRYHRHTQHQIQEMEAFFKECPHPDDKQRKELSRELGLEPLQVKFWFQNKRTQMKNQHERHENAQLRAENDKLRAENMRYKEALGTASCPSCGGPAALGEMSFDEHHLRLENARLRDEIDRISGIAAKHVGKPMVSFPVLSSPLAAAAAAARSPLDLAGAYGVQSAAAGLGADHVLFGAGAGDLLRSVSAGQLDADKPMIVELAVAAMDELLRMARPDALLWGGGASAGAQQQQLDEEEYVRTFPAGLGPRQYGLRPEASRDSAVVIMTCDSLIEILMDANRFAAVFSSIVSRASTHEVLSTGVAGSYNGALQVMSMEFQVPSPLVPTRESYFVRYCKNNPDGTWAVVDVSLDSLRPSPVIKCRRRPSGCLIQEMPNGYSKVTWVEHVEVDDRSVHNLYRPLVNSGLAFGAKRWVGTLDRQCERLASAMASNIPNGDLGVITSIEGRKSMLKLAERMVASFCGGVTASAAHQWTTLSGSGAEDVRVMTRKSVDDPGRPPGIVLNAATSFWLPVPPKRVFDFLRDETSRSEWDILSNGGAVQEMAHIANGRDHGNCVSLLRVNSANSNQSNMLILQESCTDASGSYVVYAPVDVVAMNVVLNGGDPDYVALLPSGFAILPDGPPPAGAAPSHGEGLDTGGGGSLLTVAFQILVDSVPTAKLSLGSVATVNSLIACTVERIKAAVCAEAGNPQ

SEQ ID NO: 558 - DNA, 2199 bp, Zea mays
atggatttcggcgacgaacctgagggctccgacagccagcgccagcggaagcggtaccaccggcacacgccgcgccagattcagcagctcgaggcgtacgatctcgcttcgtttccatttcttttgctgcttctttattctgtccggccgcccttgtggttgttcgtcgtgagacgtgatggtttggcggaaaggaatgtaatggcgtgcgtgctcgcccatgactgcaggatgttcaaggagtgcccgcaccccgacgagaaccagcgcgccgcgctcagccgggagctcggcctggagccgcgccagatcaagttctggtttcagaaccgccgcacccagatgaaggcgcagcacgagcgcgcggacaactgcttcctgcgcgcggagaacgacaagatccggtgcgagaacatcaccatgcgcgaggcgctcaagaacgtcatctgccccagctgcggcggcccgcccgtcgacgaggacttcttcgacgagcagaagctccgcatggagaatgcccgcctcaaggaagagctggatcgggtgtcgagcatcacgtccaagtacctcggccggccgttcacgcagatgcctccggtgccgaccatgtccgtgtcgtcgctggacctgtccgtgggcgggatgggctccctcggcgggccgtcgctggacctcgacctcctcagcggctgctcgtccgggctgccgtaccaggtgccggcgcccgtgacggaaatggagcgccccatgatggtcgatatggcggcgcgcgccatggacgagctcatccggctcgcccaggccggcgagcaaatctgggtcaagggcgtgcccggggacgcgagggaggtgctcgacgtcggtacttacgacagcctcttcgccaagcccggcgccgcgttccgcccgccggacatcaacgtcgaggcgtccagggactcgggcctcgtgttcatgagcgccgtcgcgctcgtcgacgtcttcatggacacgaacaagtggatggaattcttccccggcatcgtgtccaaggcgcaaaccgtcgatgttctcgtgaacggcttgggcgggaggagcgagtccttaatcatgatgtatgaggagctgcacatcatgactccggtcgtgccgactcgcgagctgagcttcctccgctactgcaagcagatcgagcaggggctgtgggccgtcgcggacgtctccctggaggggcagcgcgacgcccattacggcgtgccgtcccgctcccgtcgcatgccgtcggggtgcctcatcgccgacatgtcgaacggctactccaaggtgacctgggtcgaacacatggagatcgagcagatgctcccgatcaacgtcctttaccgcaacctggtgctgagcggcgccgcgttcggggcgcaccgctggctggccgcgctgcagcgtgcgtgcgagcggttcgcgtccgtggccaccctcggcgtgccgcaccacgacgtcgccggagtgacgccggaggggaagcggagcatgacgaagctgtcgcagcggatggtgagcagcttctgtgccagcctgagctcgtcgccgctgcagcggtggacgctgctctctggcaccacggacgtgagcgtccgggtctccacgcaccgcagcaccgactcaggccagcccaacggcgtcgtcctcagcgccgccacctccatctggctgcccgtccccggcgaccatgtcttcgccttcgtccgcgacgagaacgcgcgctcccagtgggatgtcctgtcgcacggcaatcaggttcaggaggtgtcgcgcatccccaacggctccaaccccggcaactgcatctccctgctaagaggtctgaacgcgaaccagaacagcatgctgatccttcaggagagctgcacggacgcgtcgggggcgctggtggtgtactcgccgatcgacatcccggcggcgaacgtggtgatgagcggcgaggacccgtcgggcatcccgctgctgccgtcgggcttcgccatcctgccggggtccggcgcgggcgcgtccagcagcgccgtcgtcccgccgccgggctgcgtggtcaccgtcgcgttccagatcctcgtcagcaacctgccgtcgtccaggctgaacgccgagtccgtcgccaccgtcaacagcctcatcggcaccaccgtgcagcagatcaaggcggcgctcaactgtgccggccattga

SEQ ID NO: 559 - protein, 732 aa, Zea mays
MDFGDEPEGSDSQRQRKRYHRHTPRQIQQLEAYDLASFPFLLLLLYSVRPPLWLFVVRRDGLAERNVMACVLAHDCRMFKECPHPDENQRAALSRELGLEPRQIKFWFQNRRTQMKAQHERADNCFLRAENDKIRCENITMREALKNVICPSCGGPPVDEDFFDEQKLRMENARLKEELDRVSSITSKYLGRPFTQMPPVPTMSVSSLDLSVGGMGSLGGPSLDLDLLSGCSSGLPYQVPAPVTEMERPMMVDMAARAMDELIRLAQAGEQIWVKGVPGDAREVLDVGTYDSLFAKPGAAFRPPDINVEASRDSGLVFMSAVALVDVFMDTNKWMEFFPGIVSKAQTVDVLVNGLGGRSESLIMMYEELHIMTPVVPTRELSFLRYCKQIEQGLWAVADVSLEGQRDAHYGVPSRSRRMPSGCLIADMSNGYSKVTWVEHMEIEQMLPINVLYRNLVLSGAAFGAHRWLAALQRACERFASVATLGVPHHDVAGVTPEGKRSMTKLSQRMVSSFCASLSSSPLQRWTLLSGTTDVSVRVSTHRSTDSGQPNGVVLSAATSIWLPVPGDHVFAFVRDENARSQWDVLSHGNQVQEVSRIPNGSNPGNCISLLRGLNANQNSMLILQESCTDASGALVVYSPIDIPAANVVMSGEDPSGIPLLPSGFAILPGSGAGASSSAVVPPPGCVVTVAFQILVSNLPSSRLNAESVATVNSLIGTTVQQIKAALNCAGH

SEQ ID NO: 560 - DNA, 2412 bp, Zea mays
atgagcttcgggagcctattcgacggcgggtccggcggcggcggaggaggaggagggatgcagttcccgttctcgaccgggttctcgtcctcgccggccctctccctcggtctggagaaccccggcggcggcatggtcggccggatgctccccgtgggcggcgcccccgcggccggcgggatggcgagggacgccgccgacgccgagaacgacagccgctccgggagcgaccacctggacgccatgtccgccggcgccggcgccgaggacgaggacgacgctgagccgggcaacccgcgcaagcgcaagaagcgctaccaccgccacacgccgcagcagatccaggagctcgaagcgctgttcaaggagtgccctcacccggacgagaagcagcgcggcgagctcagcaagaggctcggcctcgacccgcgccaggtcaagttctggttccagaaccgccgcacgcagatgaagacgcaactggagcggcacgagaacgcgcttctcaagcaagagaacgacaagctgcgggccgagaacatggcgatccgggaggcgatgcgcagcccgatgtgcggcagctgcgggagccccgccatgctcggggaggtgtccctggaggagcagcacctgtgcatcgagaatgcgcggctcaaggacgagctcaaccgcgtctacgccctcgccaccaagttcctcggcaagcccatgcccgtcctctcggggcccatgctgcagccgaacctgtcgctgcccatgccgagctcgtcgctggagctggcagtaggcggcctccgtggcctagggtctatcccttccttggacgagtttgctggcggtgtgtctagcccgttgggcacggtgatcacgcctgcacgggcgaccggatctgctccgccgcctatggtgggcgtcgacaggtccatgctgctggagcttgcgatcagcgccatggatgaactagttaagctggcacaggttgacgagcccttgtggcttcccagcctcagtggctctcccgacaagaagctgctcaactttgaggagtatgcccactcgttctctccgtccgtcggcgccgtgaagcctgtgggctatgtatccgaggcctctagggagtctggcctcgtcatcattgacaacagccttgctcttgtagagacccttatggacgtgagacggtggtctgatatgttctcgtgcatgattgctaaggccacagtcctagaggaggtgacatctggcattgcaggaagtaggaatggtgcgctgctgctgatgaaggctgagctacaggtgctctcacctctagtgcccatcagggaggtcacatttctcaggttttgcaagcagctggctgagggtgcatgggcagtagtggatgtgtccattgacggattggtgagagatcacaactctggaacagcatccaacgccggaaatatacggtgcaggaggttgccttctggctgtgtgatgcaggacactcccaatggctactgcaaggtcacatgggtagagtatacggaatacgacgaggcgtcagtacaccagctctatagaccactcatccggtccgggctggcctttggggccaggcggtggcttgcaatgctgcagcgccagtgcgaatgcctggccatactcatgtcccctgatacagtttcagctaatgactcgtcagtcataacacaggagggcaagcgaagcatgctgaagctggcacggcggatgacggagaacttctgcgccggggtcagcgcgtcatctgcacgtgaatggagtaagctggacggcgctgcaggcagcatcggggaggatgtgcgggtcatggcacggaaaagcgtggacgagcctggggagccgccgggcgtggtcctaagcgcagccacatcggtgtgggtgcccgtggctccggagaagctcttcaacttcctccgtgacgagcagctgcgtgcggagtgggacatcctcagcaacggaggcccgatgcaggagatggccaacatcgccaaggggcaggagcacgggaactcggtgtccctcctcagagccagtgccatgagtgccaaccagagcagcatgctgatcctccaggagacttgcactgatgcatcaggctcgatggtcgtgtatgctccagtggacatcccggcgatgcagctcgtcatgaacggcggggactccacctacgttgctctgctgccgtctgggttcgccatcctgcctgatggcccaagcagtgtcggcgccgagcacaagacaggcggctcgctgctcaccgtcgccttccagatcctcgtcaacagccagccgaccgccaaactcaccgtggagtcagtagagaccgtgaacaacctcatattctgcaccatcaagaagatcaagacagcgctgcagtgtgacgcttga

SEQ ID NO: 561 - protein, 803 aa, Zea mays
MSFGSLFDGGSGGGGGGGGMQFPFSTGFSSSPALSLGLENPGGGMVGRMLPVGGAPAAGGMARDAADAENDSRSGSDHLDAMSAGAGAEDEDDAEPGNPRKRKKRYHRHTPQQIQELEALFKECPHPDEKQRGELSKRLGLDPRQVKFWFQNRRTQMKTQLERHENALLKQENDKLRAENMAIREAMRSPMCGSCGSPAMLGEVSLEEQHLCIENARLKDELNRVYALATKFLGKPMPVLSGPMLQPNLSLPMPSSSLELAVGGLRGLGSIPSLDEFAGGVSSPLGTVITPARATGSAPPPMVGVDRSMLLELAISAMDELVKLAQVDEPLWLPSLSGSPDKKLLNFEEYAHSFSPSVGAVKPVGYVSEASRESGLVIIDNSLALVETLMDVRRWSDMFSCMIAKATVLEEVTSGIAGSRNGALLLMKAELQVLSPLVPIREVTFLRFCKQLAEGAWAVVDVSIDGLVRDHNSGTASNAGNIRCRRLPSGCVMQDTPNGYCKVTWVEYTEYDEASVHQLYRPLIRSGLAFGARRWLAMLQRQCECLAILMSPDTVSANDSSVITQEGKRSMLKLARRMTENFCAGVSASSAREWSKLDGAAGSIGEDVRVMARKSVDEPGEPPGVVLSAATSVWVPVAPEKLFNFLRDEQLRAEWDILSNGGPMQEMANIAKGQEHGNSVSLLRASAMSANQSSMLILQETCTDASGSMVVYAPVDIPAMQLVMNGGDSTYVALLPSGFAILPDGPSSVGAEHKTGGSLLTVAFQILVNSQPTAKLTVESVETVNNLIFCTIKKIKTALQCDA

SEQ ID NO: 562 - protein, 50 aa, Artificial sequence
  motif 16
  VARIANT (1)..(1): / replace = "Ala" / replace = "Pro"
  VARIANT (2)..(2): / replace = "Arg"
  VARIANT (4)..(4): / replace = "Val"
  VARIANT (6)..(6): / replace = "Phe"
  VARIANT (11)..(11): / replace = "Arg"
  VARIANT (13)..(13): / replace = "Thr"
  VARIANT (14)..(14): / replace = "Gln"
  VARIANT (15)..(15): / replace = "Ile"
  VARIANT (17)..(17): / replace = "Val" / replace = "Ala"
  VARIANT (18)..(18): / replace = "Arg" / replace = "Gln"
  VARIANT (19)..(19): / replace = "Lys" / replace = "Ser" / replace = "His"
  VARIANT (20)..(20): / replace = "Asn" / replace = "Cys" / replace = "Asp"
  VARIANT (21)..(21): / replace = "Asn" / replace = "Gly"
  VARIANT (22)..(22): / replace = "Glu" / replace = "Thr" / replace = "His"
  VARIANT (23)..(23): / replace = "Glu"
  VARIANT (24)..(24): / replace = "Asn"
  VARIANT (25)..(25): / replace = "Lys" / replace = "Asn" / replace = "Cys"
  VARIANT (26)..(26): / replace = "Ala" / replace = "Lys" / replace = "Ile"
  VARIANT (27)..(27): / replace = "Tyr"
  VARIANT (28)..(28): / replace = "Gln" / replace = "Lys"
  VARIANT (29)..(29): / replace = "Arg" / replace = "Ala"
  VARIANT (30)..(30): / replace = "Glu"
  VARIANT (32)..(32): / replace = "Ala" / replace = "Glu"
  VARIANT (33)..(33): / replace = "Lys"
  VARIANT (34)..(34): / replace = "Ile"
  VARIANT (35)..(35): / replace = "Leu" / replace = "Lys"
  VARIANT (36)..(36): / replace = "Ala" / replace = "Cys"
  VARIANT (37)..(37): / replace = "Glu"
  VARIANT (39)..(39): / replace = "Met" / replace = "Ile"
  VARIANT (40)..(40): / replace = "Glu" / replace = "Arg"
  VARIANT (41)..(41): / replace = "Ile"
  VARIANT (42)..(42): / replace = "Lys" / replace = "Gln"
  VARIANT (43)..(43): / replace = "Glu"
  VARIANT (44)..(44): / replace = "Gln" / replace = "Ala"
  VARIANT (45)..(45): / replace = "Met" / replace = "Ile"
  VARIANT (46)..(46): / replace = "Arg"
  VARIANT (47)..(47): / replace = "Gly" / replace = "Lys"
  VARIANT (48)..(48): / replace = "Ser" / replace = "Met" / replace = "Ala"
  VARIANT (49)..(49): / replace = "Ile"
ETQIKYWFQNCRSKMKKFQERADRSLLRKQNEELRKTNAALRNRLKNVTC

SEQ ID NO: 563 - protein, 29 aa, Artificial sequence
  motif 17
  VARIANT (1)..(1): / replace = "Pro" / replace = "Arg"
  VARIANT (2)..(2): / replace = "Lys"
  VARIANT (5)..(5): / replace = "His"
  VARIANT (6)..(6): / replace = "Arg"
  VARIANT (7)..(7): / replace = "His"
  VARIANT (9)..(9): / replace = "Pro" / replace = "Ala"
  VARIANT (10)..(10): / replace = "Arg"
  VARIANT (12)..(12): / replace = "Ile"
  VARIANT (13)..(13): / replace = "Gln"
  VARIANT (14)..(14): / replace = "Thr" / replace = "Gln" / replace = "Arg"
  VARIANT (15)..(15): / replace = "Met"
  VARIANT (16)..(16): / replace = "Glu"
  VARIANT (17)..(17): / replace = "Ala" / replace = "Ser"
  VARIANT (18)..(18): / replace = "Ala" / replace = "Tyr" / replace = "Met"
  VARIANT (19)..(19): / replace = "Asp"
  VARIANT (20)..(20): / replace = "Leu" / replace = "Lys"
  VARIANT (21)..(21): / replace = "Ser" / replace = "Ala"
  VARIANT (22)..(22): / replace = "Ser"
  VARIANT (23)..(23): / replace = "Phe"
  VARIANT (24)..(24): / replace = "Pro" / replace = "His"
  VARIANT (25)..(25): / replace = "Pro"
  VARIANT (26)..(26): / replace = "Asp"
  VARIANT (27)..(27): / replace = "Arg" / replace = "Leu" / replace = "Asp"
  VARIANT (28)..(28): / replace = "Asn" / replace = "Leu"
  VARIANT (29)..(29): / replace = "Leu" / replace = "Gln"
KRRYQLLTMQQKEELNRLFQECPNFLEKD

SEQ ID NO: 564 - protein, 10 aa, Artificial sequence
  motif 18
  VARIANT (1)..(1): / replace = "Asn"
  VARIANT (3)..(3): / replace = "Arg" / replace = "Asn" / replace = "His" / replace = "Tyr"
  VARIANT (4)..(4): / replace = "Ser"
  VARIANT (5)..(5): / replace = "Arg" / replace = "Lys"
  VARIANT (6)..(6): / replace = "Leu" / replace = "Met" / replace = "Val"
  VARIANT (7)..(7): / replace = "Val" / replace = "Ile" / replace = "Thr"
  VARIANT (8)..(8): / replace = "Trp"
  VARIANT (9)..(9): / replace = "Leu" / replace = "Ile" / replace = "Met"
  VARIANT (10)..(10): / replace = "Glu" / replace = "Val"
DGCCQIYAVD

SEQ ID NO: 565 - DNA, 1264 bp, Oryza sativa; identical to SEQ ID NO: 276

SEQ ID NO: 566 - DNA, 4013 bp, Artificial sequence
  expression cassette pRCc3::HD8-like::t-zein
tcgacgctactcaagtggtgggaggccaccgcatgttccaacgaagcgccaaagaaagccttgcagactctaatgctattagtcgcctaggatatttggaatgaaaggaaccgcagagtttttcagcaccaagagcttccggtggctagtctgatagccaaaattaaggaggatgccaaaacatgggtcttggcgggcgcgaaacaccttgataggtggcttaccttttaacatgttcgggccaaaggccttgagacggtaaagttttctatttgcgcttgcgcatgtacaattttattcctctattcaatgaaattggtggctcactggttcattaaaaaaaaaagaatctagcctgttcgggaagaagaggattttgttcgtgagagagagagagagagagagagagagagagagagagaaggaggaggaggattttcaggcttcgcattgcccaacctctgcttctgttggcccaagaagaatcccaggcgcccatgggctggcagtttaccacggacctacctagcctaccttagctatctaagcgggccgacctagtagccacgtgcctagtgtagattaaagttgccgggccagcaggaagccacgctgcaatggcatcttcccctgtccttcgcgtacgtgaaaacaaacccaggtaagcttagaatcttcttgcccgttggactgggacacccaccaatcccaccatgccccgatattcctccggtctcggttcatgtgatgtcctctcttgtgtgatcacggagcaagcattcttaaacggcaaaagaaaatcaccaacttgctcacgcagtcacgctgcaccgcgcgaagcgacgcccgataggccaagatcgcgagataaaataacaaccaatgatcataaggaaacaagcccgcgatgtgtcgtgtgcagcaatcttggtcatttgcgggatcgagtgcttcacagctaaccaaatattcggccgatgatttaacacattatcagcgtagatgtacgtacgatttgttaattaatctacgagccttgctagggcaggtgttctgccagccaatccagatcgccctcgtatgcacgctcacatgatggcagggcagggttcacatgagctctaacggtcgattaattaatcccggggctcgactataaatacctccctaatcccatgatcaaaaccatctcaagcagcctaatcatctccagctgatcaagagctcttaattagctagctagtgattagctgcgcttgtgatcatttaaatcaactagggatatcacaagtttgtacaaaaaagcaggcttaaacaatgaacggcgagcttaaacttatggcttcctatgtgagcaagcttaagttcatcttgcaaaaagatcagcagcaggagccccatactgcgaaccttctagtcctacttgggagtagcaatcaggacaaaagaaatggcctctcacagggagaaaacagaatggacacttgtaccagaaagaagccaagaagataccaactcctcaccatgcaacaaaaagaaacgcttaatcgtgcatttcaatcatgtccgaaccctgatagaaatgacttgaagaagttggccaaggaactaaacatgactgagacccaaatcaaatattggttccagaactgcaggacaaagatgaagaaattcaagaacaatgaggagcgcaaactactgcagaaggagaatgaggagctaaagaaggagaatgcagagttgagaaataggatgaagaactcaacatgccgcgcttgtgacctccctttgttccatatagattgccgtcattgggagaatccaatgctcaacaagggtaatcatggcgttacaagtaatctcattcctcaggcagtgtcatccttgctccccagctcaagtggttttgtagcttcaggctccaatcttagtagcaatgctgtgctcatgcccgtatctgccatgccatcatcagttttgcagcctgctccagccgtctctggtgccaattttcccatcttgcacaatctatctgccaatgcaaatgatggctatacggaaaaaaacgtacttcttgatctggcgaaccgtgcaatggaagagttctttagtctaatgaaggagaatgagtctcttcttgtcaaaaaaaaggagaatgggcctctctggctcccacacatggatattctgggagtcgaatcacttaactaccaggaataccttgcaaaatccaggacgattggacaaaaacctgttgacttcaaagtggtcgtcaccagggacactgccattgtcaatggtagctgtgttgacctcgtcaaaagccttttggatgctaaccgctggagagagttgtttccaggcatcgtggcaagtgcaaacaccaccaagatcatctctactgggccctctaacttgcacgacgggttgcttcaattgatgcgtgcagagctccaggtaatgtcacctgaagtcccagtttgcgatgtgacattcttgaggcagagtgtgcagtttggaagtggactgtggtgtgtggttgatgtgtctattgataccatccttcctggagagagtaaaacagctcagtccagtgtgcagaccagcagtacagctgccagacgcatggaagtcaggctgttgccatcaggctgtgttattgaagaaatggagaatggctattccaaggtgacctggatggtgcatgcagcttatgatgagagagcagtgccagtgctttatcattcacttctccgctctgcaaaagcccttggtgcgtgccgctgggtagcatcactccagagacacagccagttcctttccggcctgcacaaatacatcttttgtcctgacagcacaatgacagaagtggtgatgcgaagaaaagtcctgtacctggtgaagcagatgacgagcagcttcacaggcctatttgcgtcgatgtctaaggccacgctgcaagatggtgatgatactcacttcgcgcatcagatagttggtggtgcaacaggtgaacctgccggactgctgctgagcgccaccacaaccatatggctccccggcgtgaacccgaggcacgtgtatgaccacctgcgtgatgagcagtgccatggtgaatggcgctgcctcctcggtgagcagctgcatcagggcaatgccttgccgtatggtgcccccctgaatggtgagaccgtgccagagttctatcgcatggtgaacgggctgcatgaagggcatgctatctccctgatcagccccagagaaatgggtggtaacataagcaacactctgctcctgcaagaggcaagaactgatctttctggctccctcatagtttacgccaggacagatgtgaacaccgtgcattccatcatgaacagtggcctcaaccctgccaccgtcttcctcgtatcctctggatgtgccattcttcctgattgcctggaatcattccctctacacccagctgcaactgcagatcaggccggcacctccagtgccgctatcgctagcaggagcgaaaccggtgggtcattcgtcaccgtcacttaccagatgtttttcagcagccaaggtggcgcagcacctgccagctcatcaattcatcaaggccgtgatgcgctcaagaaagccaccgacattttcaaggtggtcctcgacactctcaccgtggcatagcgcaataccccaggggtagcatttgcatgcgaaagacccagctttcttgtacaaagtggtgatatcacaagcccgggcggtcttctagggataacagggtaattatatccctctagatcacaagcccgggcggtcttctacgatgattgagtaataatgtgtcacgcatcaccatgggtggcagtgtcagtgtgagcaatgacctgaatgaacaattgaaatgaaaagaaaaaaagtactccatctgttccaaattaaaattcattttaaccttttaataggtttatacaataattgatatatgttttctgtatatgtctaatttgttatcatcc

SEQ ID NO: 567 - DNA, 55 bp, Artificial sequence
  primer: prm15035
ggggacaagtttgtacaaaaaagcaggcttaaacaatgaacggcgagcttaaact

SEQ ID NO: 568 - DNA, 49 bp, Artificial sequence
  primer: prm15036
ggggaccactttgtacaagaaagctgggtctttcgcatgcaaatgctac

1-108. (canceled)

109. A method for enhancing yield-related traits in a plant relative to a control plant, comprising modulating expression in a plant of a nucleic acid encoding:
(i) an LEJ1 polypeptide, wherein said LEJ1 polypeptide comprises at least one, preferably two, CBS domain(s) (SMART entry SM00116);
(ii) an ExbB polypeptide, wherein said ExbB polypeptide comprises an InterPro accession IPR002898MotA/TolQ/ExbB proton channel domain, which corresponds to PFAM accession number PF01618 MotA_ExbB domain;
(iii) a nicotinamide phosphoribosyltransferase (NMPRT), wherein said NMPRT is of non-vertebrate origin and comprises:
(a) a domain with an InterPro accession IPR016471, and
(b) at least 50% amino acid sequence identity, or at least 51%, 52%, 53%, 54%, 55%, 56%, 57%, 58%, 59%, 60%, 61%, 62%, 63%, 64%, 65%, 66%, 67%, 68%, 69%, 70%, 71%, 72%, 73%, 74%, 75%, 76%, 77%, 78%, 79%, 80%, 81%, 82%, 83%, 84%, 85%, 86%, 87%, 88%, 89%, 90%, 91%, 92%, 93%, 94%, 95%, 96%, 97%, 98%, or 99% or more amino acid sequence identity to the domain of SEQ ID NO: 315;
(iv) an AP2-26-like polypeptide, wherein said AP2-26-like polypeptide comprises a Pfam PF00847 domain; or
(v) an HD8-like polypeptide, wherein said HD8-like polypeptide comprises a homeodomain (PF00046) and a START domain (PF01852).

110. The method of claim 109, wherein said modulated expression is effected by introducing and expressing in the plant said nucleic acid encoding an LEJ1 polypeptide, an ExbB polypeptide, a NMPRT, an AP2-26-like polypeptide, or an HD8-like polypeptide.

111. The method of claim 109, wherein said enhanced yield-related traits comprise increased yield and/or increased early vigour relative to a control plant, and wherein said increased yield preferably comprises increased biomass and/or increased seed yield relative to a control plant.

112. The method of claim 109, wherein said enhanced yield-related traits are obtained under non-stress conditions.

113. The method of claim 109, wherein said enhanced yield-related traits are obtained under conditions of drought stress, salt stress or nitrogen deficiency.

114. The method of claim 109, wherein:
(i) the LEJ1 polypeptide comprises one or more of motifs 1 to 6 (SEQ ID NO: 205 to SEQ ID NO: 210);
(ii) the ExbB polypeptide comprises at least one additional transmembrane domain;
(iii) the NMPRT comprises at least 64% amino acid sequence identity, or at least 65%, 66%, 67%, 68%, 69%, 70%, 71%, 72%, 73%, 74%, 75%, 76%, 77%, 78%, 79%, 80%, 81%, 82%, 83%, 84%, 85%, 86%, 87%, 88%, 89%, 90%, 91%, 92%, 93%, 94%, 95%, 96%, 97%, 98%, 99% or more amino acid sequence identity to one or more of the following motifs:
a) Motif 7:
(SEQ ID NO: 318)
FKLHDFGARGVSSGESSGIGGLAHLVNFQGSDTV,
b) Motif 8:
(SEQ ID NO: 319)
AAYSIPAAEHSTITAWG,
c) Motif 9:
(SEQ ID NO: 320)
AVVSDSYDL,
d) Motif 10:
(SEQ ID NO: 321)
VIRPDSGDP,
e) Motif 11:
(SEQ ID NO: 322)
VRVIQGDGV,
f) Motif 12:
(SEQ ID NO: 323)
NLAFGMGGALLQKVNRDT;
(iv) the AP2-26-like polypeptide comprises one or more of the following motifs:
a) Motif 13:
(SEQ ID NO: 378)
KLYRGVRQRHWGKWVAEIRLP[RK]NRTRLWLGTFDTAE
[ED]AAL[TA]YD[KQ]AA[YF][RK]LR,
b) Motif 14:
(SEQ ID NO: 379)
[GHA][ELS][YRA][GKP]PL[DH][AS][SAT]VDAKL[QE]AIC
[DQ][TSN][ILM],
c) Motif 15:
(SEQ ID NO: 380)
PS[YVWL]EIDW;
or
(v) the HD8-like polypeptide comprises one or more of the following motifs:
a) Motif 16:
(SEQ ID NO: 562)
[EAP][TR]Q[IV]K[YF]WFQN[CR]R[ST][KQ][MI]K[KVA]
[FRQ][QKSH[ENCD][RNG][AETH][DE][RN][SKNC][LAKI][LY][RQK][KR
A][QE]N[EAD][EK][LI][RLK][KAC][TE]N[AMI][AER][LI][RKQ][NE][RQA]
[LMI][KR][NGK][VSMA][TI]C,
b) Motif 17:
(SEQ ID NO: 563)
[KPR][RK]RY[QH][LR][LH]T[MPA][QR]Q[KI][EQ][ETQR]
[LM][NE][RAS][LAYM][FD][QLK][ESA][CS][PF][NPH][FP][LD][ERLD][KN
L][DLQ],
c) Motif 18:
(SEQ ID NO: 564)
[DN]G[CRNHY][CS][QRK][ILMV][YVIT][AW][VLIM]
[DEV].

115. The method of claim 109, wherein said nucleic acid is of plant origin or of prokaryotic origin, from a dicotyledonous or monocotyledonous plant, or from a cyanobacterium.

116. The method of claim 109, wherein said nucleic acid encodes any one of the polypeptides listed in one of Tables A1, A2, A3, F, or J, or is a portion of such a nucleic acid, or a nucleic acid capable of hybridizing with such a nucleic acid.

117. The method of claim 109, wherein said nucleic acid sequence encodes an orthologue or paralogue of any of the polypeptides given in Table A1, A2, A3, F or J.

118. The method of claim 109, wherein:
(i) said nucleic acid encodes an LEJ1 polypeptide comprising the amino acid sequence of SEQ ID NO: 2;
(ii) said nucleic acid encoding a NMPRT comprises the nucleotide sequence of SEQ ID NO: 281 or SEQ ID NO: 309;
(iii) said nucleic acid encodes an AP2-26-like polypeptide comprising the amino acid sequence of SEQ ID NO: 329; or
(iv) said nucleic acid encodes an HD8-like polypeptide comprising the amino acid sequence of SEQ ID NO: 385.

119. The method of claim 109, wherein said nucleic acid is operably linked to a constitutive promoter, a medium strength constitutive promoter, a plant promoter, a GOS2 promoter, a GOS2 promoter from rice, a root-specific promoter, an RCc3 promoter, or the RCc3 promoter from rice.

120. A plant, plant cell, or plant part, including seeds, obtained by the method of claim 109, wherein said plant, plant cell, or plant part comprises a recombinant nucleic acid encoding the LEJ1 polypeptide, the ExbB polypeptide, the NMPRT, the AP2-26-like polypeptide, or the HD8-like polypeptide.

121. A construct comprising:
(i) the nucleic acid encoding an LEJ1 polypeptide, an ExbB polypeptide, a NMPRT, an AP2-26-like polypeptide, or an HD8-like polypeptide as defined in claim 109;
(ii) one or more control sequences capable of driving expression of the nucleic acid of (i); and optionally
(iii) a transcription termination sequence.

122. The construct of claim 121, wherein one of said control sequences is a constitutive promoter, a medium strength constitutive promoter, a plant promoter, a GOS2 promoter, a GOS2 promoter from rice, a root-specific promoter, an RCc3 promoter, or the RCc3 promoter from rice.

123. A method for making a plant having enhanced yield-related traits, preferably increased yield and/or increased early vigour, relative to a control plant, comprising utilizing the construct of claim 122, wherein said increased yield preferably comprises increased seed yield and/or increased biomass relative to a control plant.

124. A plant, plant cell, or plant part transformed with the construct of claim 121.

125. A method for the production of a transgenic plant having enhanced yield-related traits relative to a control plant, preferably increased yield and/or increased early vigour relative to a control plant, wherein said increased yield preferably comprises increased seed yield and/or increased biomass relative to a control plant, comprising:
(i) introducing and expressing in a plant cell or plant the nucleic acid encoding an LEJ1 polypeptide, an ExbB polypeptide, a NMPRT, an AP2-26-like polypeptide, or an HD8-like polypeptide as defined in claim 109; and
(ii) cultivating said plant cell or plant under conditions promoting plant growth and development.

126. A transgenic plant having enhanced yield-related traits relative to a control plant, preferably increased yield and/or increased early vigour relative to a control plant, wherein said increased yield comprises preferably increased seed yield and/or increased biomass relative to a control plant and is resulted from modulated expression of a nucleic acid encoding the LEJ1 polypeptide, the ExbB polypeptide, the NMPRT, the AP2-26-like polypeptide, or the HD8-like polypeptide as defined in claim 109, or a transgenic plant cell derived from said transgenic plant.

127. The transgenic plant of claim 126, or a transgenic plant cell derived therefrom, wherein said plant is a crop plant, such as beet, sugarbeet or alfalfa; or a monocotyledonous plant such as sugarcane; or a cereal, such as rice, maize, wheat, barley, millet, rye, triticale, sorghum, emmer, spelt, secale, einkorn, teff, milo or oats.

128. Harvestable parts of the transgenic plant of claim 127, wherein said harvestable parts are preferably shoot biomass and/or seeds.

129. Products derived from the transgenic plant of claim 127 and/or from harvestable parts of said transgenic plant.
